(19) United States
(12) Patent Application Publication
(10) Pub. No.: US 2023/0279076 A1
(43) Pub. Date: Sep. 7, 2023

(54) T-Cell Modulatory Polypeptides with Conjugation Sites and Methods of Use Thereof

(71) Applicant: Cue Biopharma, Inc., Boston, MA (US)

(72) Inventors: Ronald D. SEIDEL, III, Natick, MA (US); Rodolfo J. CHAPARRO, Cambridge, MA (US); John F. ROSS, Arlington, MA (US); Chee Meng LOW, Boston, MA (US); Anish SURI, Boston, MA (US); Raymond J. MONIZ, Boston, MA (US); Gurpanna SAGGU, Westwood, MA (US)

(21) Appl. No.: 18/005,813

(22) PCT Filed: Jul. 14, 2021
(86) PCT No.: PCT/US21/41675

§ 371 Date: Jan. 17, 2023

Related U.S. Application Data
(60) Provisional application No. 63/051,472, filed on Jul. 14, 2020.
(60) Provisional application No. 63/110,929, filed on Nov. 6, 2020.
(60) Provisional application No. 63/120,677, filed on Dec. 2, 2020.

(51) Int. Cl. C07K 14/74; C07K 14/55

(52) U.S. Cl. CPC C07K 14/70539; C07K 14/55

(57) ABSTRACT

The present disclosure provides T cell modulatory polypeptides (T-Cell-MPs) comprising a chemical conjugation site and at least one immunomodulatory polypeptide sequence that may be selected to exhibit reduced binding affinity to its cognate co-immunomodulatory polypeptide. The unconjugated T-Cell-MPs may be conjugated to a molecule displaying an epitope to form a T-Cell-MP-epitope conjugate. The T-Cell-epitope conjugates are useful for modulating the activity (e.g., increasing proliferation or cytotoxic activity) of T cells specific to the conjugate epitope, and accordingly for use as therapeutics.

### INCORPORATION OF SEQUENCE LISTING

[0001] This application contains a sequence listing submitted electronically via EFS-web, which serves as both the paper copy and the computer readable form (CRF) and consists of a file entitled “123640-8021US02_seqlist.txt”, which was created on Jul. 13, 2021, which is 641,516 bytes in size, and which is herein incorporated by reference in its entirety.

### INTRODUCTION

[0002] The ability to induce an adaptive immune response involves the engagement of the T cell receptor (TCR) present on the surface of a T cell with a small peptide or non-peptide molecule (e.g., an epitope of a molecule such as a polypeptide) presented by a major histocompatibility complex (MHC; also referred to in humans as a human leukocyte antigen (HLA) complex) that is located on the surface of an antigen presenting cell (APC). This engagement represents the immune system's targeting mechanism and is a requisite molecular interaction for T cell modulation (activation or inhibition) and effector function. Following epitope-specific cell targeting, the response of targeted T cells is dictated by the presence of immunomodulatory molecules (some of which are found on the surface of the APC) that act through engagement of counterpart receptors on the T cells. Both signals—epitope/TCR binding and engagement of immunomodulatory molecules with their counterpart receptors on T cells—are required to drive activation or inhibition of target T cell functions. The TCR is specific for a given epitope; however, the counterpart receptors for immunomodulatory molecules are not epitope-specific, and instead, are generally expressed on all T cells or on large T cell subsets.

### SUMMARY

[0003] The present disclosure provides T cell modulatory polypeptides (a “T-Cell-MP” or multiple “T-Cell-MPs”) that find use in, among other things, methods of in vivo, ex vivo, and in vitro treatment of various diseases (e.g., cancers, viral infections and autoimmune disorders) and other disorders of mammals (e.g., humans) and the preparation of medicaments for such treatments. In one aspect, the T-Cell-MPs described herein comprise a portion of a class I MHC-H polypeptide, a β2M polypeptide, a chemical conjugation site for covalently attaching an epitope presenting molecule, and at least one immunomodulatory polypeptide (also referred to herein as a “MOD polypeptide” or, simply, a “MOD”). Any one or more of the MODs present in the T-Cell-MP may be wild-type (“wt.”) or a variant that exhibits an altered binding affinity to its cellular binding partner/receptor (e.g., T cell surface), referred to as a Co-MOD.

[0004] T-Cell-MPs may be unconjugated, in which case they comprise at least one chemical conjugation site at which a molecule comprising a target antigenic determinate (e.g., a peptide, glycopeptide, or non-peptide such as a carbohydrate presenting an epitope) may be covalently bound to form a T-Cell-MP-epitope conjugate for presentation to a cell bearing a T cell receptor. Unconjugated T-Cell-MPs comprising a chemical conjugation site for linking an epitope are useful for rapidly preparing T-Cell-MP-epitope conjugates that can modulate the activity of T cells specific to the epitope presented and, accordingly, for modulating an immune response involving those T cells in an individual.

[0005] The T-Cell-MPs described herein are suitable for production in cell-based expression systems where most, or substantially all (e.g., greater than 75%, 85% or 90%) or all, of the expressed unconjugated T-Cell-MP polypeptide/protein is in a soluble non-aggregated state that is suitably stable at 37° C. for production in tissue culture and use at least up to that temperature. The T-Cell-MPs can advantageously be produced as a single polypeptide encoded by a nucleic acid sequence contained in a single vector. The T-Cell-MPs may form higher order structures, such as duplexes (see, e.g., FIG. 1), which may be homodimeric as in FIG. 9, or heterodimeric when formed from two T-Cell-MPs, e.g., as illustrated in FIGS. 10 and 11. Unconjugated T-Cell-MPs can be expressed in high yield, e.g., greater than 25, 40, 60, or 80 mg/liter (e.g. about 25 to about 40, about 40 to about 60, or about 60 to about 80 mg/l in CHO cells). Yields can be high especially when a disulfide bond is present between the carboxyl end of the MHC-H chain α₁ helix and the MHC-H chain α₂₋₁ helix (e.g. a Y84C to A139C disulfide bond), and the linker between the MHC-H polypeptide sequence and the β2M polypeptide is of sufficient length (e.g., from about 10 to about 50 aa long). With the disulfide bond present between the α₁ and α₂ helices, unconjugated T-Cell-MP expression levels may exceed 80 mg/l (e.g., from about 80 to about 100, about 100 to about 120, about 120 to about 140, about 140 to about 160, about 160 to about 180, or about 180 to about 200 mg/1).

[0006] Once purified, most, substantially all (e.g., greater than 85% or 90% of the T-Cell-MP), or all of the expressed unconjugated T-Cell-MP protein remains in a soluble non-aggregated state even after conjugation to an epitope (e.g., peptide epitopes) and is similarly stable compared to the unconjugated T-Cell-MP. The unconjugated T-Cell-MPs and their epitope conjugates may additionally comprise a targeting sequence that can direct a T-Cell-MP epitope conjugate to a particular cell or tissue (e.g., a tumor). Payloads (e.g., bioactive substances or labels), such as a therapeutic (e.g., chemotherapeutic agents) for co-delivery with a specific target epitope, may also be covalently attached to a T-Cell-MP, such as by a crosslinking agent. Accordingly, T-Cell-MP-epitope conjugates may be considered a means by which to deliver MODs (e.g., IL-2, 4-1BBL, FasL, TGF-β, CD70, CD80, CD86, or variants thereof) and/or payloads (e.g., chemotherapeutics) to T cells in an epitope-specific manner optionally with the assistance of a targeting sequence.

[0007] The T-Cell-MPs may comprise modifications that assist in the stabilization of the unconjugated T-Cell-MP during intracellular trafficking and/or following secretion by cells expressing the multimeric polypeptide even in the absence of an associated epitope (e.g., a peptide epitope). One such modification is a bond (e.g., disulfide bond) formed between amino acid position 84 at the carboxyl end of the MHC class I α₁ helix (or its flanking amino acid sequences aac1 and aac2) and amino acid position 139 at the amino end of the MHC-class I α₂₋₁ helix (or its flanking amino acid sequences aac3 and aac4). For example, the insertion of cysteine residues at amino acids 84 (Y84C substitution) and 139 (A139C substitution) of MHC-H, or the equivalent positions (see, e.g., FIG. 3I), may form a disulfide linkage that helps stabilize the T-Cell-MP. See, e.g., Z. Hein et al. (2014), Journal of Cell Science 127:2885-2897.

[0008] One aspect of the T-Cell-MP molecules described herein is broadly directed to an unconjugated T-Cell-MP, the polypeptide comprising (e.g., from N-terminus to C-terminus):
[0009] (i) optionally one or more MOD polypeptide sequences (e.g., two or more MOD polypeptide sequences, such as in tandem, wherein when there are two or more MOD polypeptide sequences they are optionally joined to each other by independently selected L1 linkers);
[0010] (ii) an optional L2 linker polypeptide sequence joining the one or more optional MOD polypeptide sequences to a β2M polypeptide sequence;
[0011] (iii) the β2M polypeptide sequence;
[0012] (iv) an optional L3 linker polypeptide sequence (e.g., from 10-50 aa in length);
[0013] (v) a class I MHC-H polypeptide sequence;
[0014] (vi) an optional L4 linker polypeptide sequence;
[0015] (vii) a scaffold polypeptide sequence (e.g., an immunoglobulin Fc sequence);
[0016] (viii) an optional L5 linker polypeptide sequence; and
[0017] (ix) optionally one or more MOD polypeptide sequences (e.g., two or more MOD polypeptide sequences, such as in tandem, wherein when there are two or more MOD polypeptide sequences they are optionally joined to each other by independently selected L6 linkers);
[0018] wherein the unconjugated T cell modulatory polypeptide comprises at least one MOD polypeptide sequence (e.g., the MOD(s) of element (i) and/or (ix)); and
[0019] wherein at least one of the β2M polypeptide sequence, the L3 linker polypeptide sequence, and/or the MHC-H polypeptide sequence comprises a chemical conjugation site (e.g., provided by protein engineering, such as a cysteine substitution) for epitope conjugation.

[0020] It is understood that such unconjugated T-Cell-MPs do not comprise a covalently attached epitope (e.g., peptide epitope); however, the disclosure includes and provides for T-Cell-MP epitope conjugates that further comprise a covalently attached epitope. The covalently attached epitope can be positioned within the binding cleft of the MHC-H/β2M polypeptide sequences and presented to a TCR, thereby permitting use of the molecules as agents for clinical testing and diagnostics, and as therapeutics. The T-Cell-MPs and their epitope conjugates described herein represent scalable antigen presenting cell-independent (APC-independent) immunotherapeutics that enable clinically effective levels of antigen specific T cell modulation (e.g., inhibition or activation) depending on the MOD(s) present. Moreover, the scaffold portions of T-cell MPs, which may be immunoglobulin Fc domains, permit multivalent presentation of MHC-epitope conjugate and MOD moieties to cognate T cells sufficient for their activation.

### BRIEF DESCRIPTION OF THE DRAWINGS

[0021] FIG. 1 depicts preferential activation of T cells by an embodiment of a duplex T-Cell-MP-epitope conjugate with an indirect (via a linker) covalent attachment of the epitope to the β2M polypeptides and bearing MODs, which can be wt. and/or variant MODs (e.g., having reduced affinity for their receptors (Co-MODs)). The first, epitope-specific T cell is activated due to productive engagement of both the TCRs and Co-MODs. In contrast, the second, epitope-non-specific T cell is not activated as the epitope cannot engage the TCR, and thus the MODs by themselves do not lead to productive engagement. Linkers and the location of optional linkers are represented by black lines joining T-Cell-MP elements.

[0022] FIGS. 2A-2H provide amino acid sequences of immunoglobulin heavy chain polypeptides (including SEQ ID NOs. 1-13).

[0023] FIG. 2I provides the sequence of a human immunoglobulin J-chain (SEQ ID NO:14).

[0024] FIG. 2J provides the sequence of an Ig CH1 domain sequence (SEQ ID NO:15).

[0025] FIG. 2K provides sequences of Ig κ and Ig λ chains (SEQ ID NOs:16-17).

[0026] FIGS. 3A, 3B and 3C provide amino acid sequences of major histocompatibility complex class I heavy chain (MHC-H; also known as human leukocyte antigen (HLA) Class I heavy chain) polypeptides. Signal sequences, aas 1-24, are bolded and underlined. FIG. 3A entry: 3A.1 is the HLA-A heavy chain (HLA-A*01:01:01:01 or A*0101) (NCBI accession NP_001229687.1), SEQ ID NO:18; entry 3A.2 is HLA-A*1101, SEQ ID NO:19; entry 3A.3 is HLA-A*2402, SEQ ID NO:20, and entry 3A.4 is HLA-A*3303, SEQ ID NO:21. FIG. 3B provides the sequence for HLA-B*07:02:01 (HLA-B*0702) (NCBI GenBank Accession NP_005505.2), SEQ ID NO:22. FIG. 3C provides the sequence for HLA-C*0701 (GenBank Accession NP_001229971.1) (HLA-C*07:01:01:01 or HLA-Cw*070101), (HLA-Cw*07) (see GenBank Accession CA078194.1), SEQ ID NO:23.

[0027] FIG. 3D provides an alignment of all, or substantially all, of the α1, α2, and α3 domains of eleven mature MHC-H polypeptide sequences without all, or substantially all, of their leader, transmembrane and intracellular domain regions. The aligned sequences include human HLA-A*0101, SEQ ID NO:24 (see also SEQ ID NO:18); HLA-B*0702, SEQ ID NO:25; HLA-C, SEQ ID NO:26; HLA-A*0201, SEQ ID NO:27; a mouse H2K protein sequence, SEQ ID NO:28; three variants of HLA-A (var. 2, var. 2C [having Y84C and A139C substitutions], and var. 2CP), SEQ ID NOs:29-31; 3 human HLA-A molecules (HLA-A*1101 (HLA-A11), SEQ ID NO:32; HLA-A*2402 (HLA-A24), SEQ ID NO:33; and HLA-A*3303 (HLA-A33), SEQ ID NO:34). HLA-A*0201 is a variant of HLA-A. The Y84A and A236C variant of HLA-A is marked as HLA-A (var. 2). The seventh HLA-A sequence, marked as HLA-A (var. 2C), shows HLA-A substituted with C residues at positions 84, 139 and 236, and the eighth sequence adds one additional proline to the C-terminus of the preceding sequence. The ninth through the eleventh sequences are from HLA-A11 (HLA-A*1101); HLA-A24 (HLA-A*2402); and HLA-A33 (HLA-A*3303), respectively, which are prevalent in certain Asian populations. Indicated in the alignment are the locations (84 and 139 of the mature proteins) where cysteine residues may be inserted in place of the aa at that position for the formation of a disulfide bond to stabilize the MHC-H −β2M complex in the absence of a bound peptide epitope. Also shown in the alignment is position 236 (of the mature polypeptide), which may be replaced by a cysteine residue that can form an interchain disulfide bond with β2M (e.g., at aa 12 of the mature polypeptide forming, for example, an HLA-A*0201 A236C to β2M R12C disulfide bond). An arrow appears above each of those locations and the residues are bolded. The boxes flanking residues 84, 139 and 236 show the groups of five aas on either side of those six sets of five residues, denoted aa clusters 1, 2, 3, 4, 5, and 6 (shown in the figure as aac 1 through aac 6, respectively), that may be replaced by 1 to 5 aas selected independently from (i) any naturally occurring aa or (ii) any naturally occurring aa except proline or glycine.

[0028] FIGS. 3E-3G provide alignments of the aa sequences of all, or substantially all, of the α1, α2, and α3 domains of several mature HLA-A, -B, and -C class I heavy chains, respectively. The sequences are provided for a portion of the mature proteins (without all or substantially all of their leader sequences, transmembrane domains or intracellular domains). As described in FIG. 3D, the positions of aa residues 84, 139, and 236 and their flanking residues (aac 1 to aac 6) that may be replaced by 1 to 5 aas selected independently from (i) any naturally occurring aa or (ii) any naturally occurring aa except proline or glycine are also shown. A consensus sequence is also provided for each group of HLA alleles provided in the figures showing the variable aa positions as “X” residues sequentially numbered and the locations of aas 84, 139 and 236 double underlined.

[0029] FIG. 3H provides a consensus sequence for all, or substantially all, of the α1, α2, and α3 domains of each of HLA-E, -F, and -G polypeptides with the variable aa positions indicated as “X” residues sequentially numbered and the locations of aas 84, 139 and 236 double underlined.

[0030] FIG. 3I provides an alignment of the consensus aa sequences for HLA-A, -B, -C, -E, -F, and -G, which are given in FIGS. 3E to 3H (SEQ ID NOs: 39, 47, and 57-60). The alignment shows the correspondence of aas between the different sequences. Variable residues in each sequence are listed as “X” with the sequential numbering removed. The permissible aas at each variable residue can be determined by reference to FIGS. 3E-3H. As indicated in FIG. 3D, the locations of aas 84, 139 and 236 with their flanking five-aa clusters that may be replaced by 1 to 5 aas selected independently from (i) any naturally occurring aa or (ii) any naturally occurring aa except proline or glycine are also shown.

[0031] FIG. 4 provides a multiple aa sequence alignment of β2M precursors (i.e., including the leader sequence) from Homo sapiens (NP_004039.1; SEQ ID NO:61), Pan troglodytes (NP_001009066.1; SEQ ID NO:62), Macaca mulatta (NP_001040602.1; SEQ ID NO:63), Bos Taurus (NP_776318.1; SEQ ID NO:64) and Mus musculus (NP_033865.2; SEQ ID NO:65). Underlined aas 1-20 are the signal peptide (sometime referred to as a leader sequence). The mature β2M sequences starts at aa 21.

[0032] FIG. 5 provides six unconjugated T-Cell-MP embodiments (structures) marked as A through F. In each case the T-Cell-MPs comprise: at least one MOD polypeptide sequence; a core structure that comprises the elements, in the N-terminus to C-terminus direction: a β2M polypeptide sequence, a Class I MHC-H polypeptide sequence comprising MHC-H α1, α2, and α3 domain sequences; and a scaffold polypeptide sequence (e.g., an Ig Fc polypeptide sequence). In the embodiments shown the α1 and α2 polypeptide sequences are linked by an intra-peptide bond between cysteines substituted, for example, with Tyr 84 and Ala 139 (Y84C and A139C substitutions). One or more MODs are located at the amino and/or carboxyl side of the core structure. Optional linker polypeptides that are selected independently, denoted as L1 to L6, are indicated by the line segments. The optional linker polypeptides may appear at either the ends of the T-Cell-MP polypeptide or joining the indicated polypeptide sequences. While the chemical conjugation site for coupling the epitope can be located at any location on the T-Cell-MP, potential locations in the β2M polypeptide sequence and the MHC-H polypeptide sequence for the chemical conjugation sites are indicated by asterisks. Although not shown, chemical conjugation sites may also be located in the L3 linker joining the β2M polypeptide sequence and MHC-H polypeptide sequence.

[0033] FIG. 6 provides six embodiments of unconjugated T-Cell-MPs, marked as A through F, that parallel the embodiments in FIG. 5. In the embodiments shown, the chemical conjugation site is indicated as being present in the β2M polypeptide sequence (e.g., comprising an E44C substitution) and the scaffold is an immunoglobulin Fc region, which may be interspecific, thereby permitting two different unconjugated T-Cell-MPs to specifically combine to form a heteroduplex.

[0034] FIG. 7 provides examples of unconjugated T-Cell-MPs having different MOD substitutions (e.g., tandem IL-2 MODs in structure A). The chemical conjugation sites are indicated as being present in the β2M polypeptide sequence (e.g., an E44C substitution); however, they could be in the MHC-H polypeptide (the α1, α2, and α3 sequence), or in the linker joining the β2M and MHC polypeptides. The Fc scaffold may be replaced by any other scaffold sequence such as an interspecific Fc polypeptide sequence that can form a heterodimer with its counterpart sequence, and the specific linkers listed are only exemplary and may be replaced by other linker polypeptide sequences.

[0035] FIG. 8 shows some schematics of epitopes having a maleimide group appended for conjugation to a free nucleophile (e.g., cysteine) present in a T-Cell-MP to form an epitope conjugate. In “a” the maleimide group is attached by an optional linker (e.g., a peptide linker sequence) to the epitope. In “b”-“e,” the linker is a glycine serine polypeptide GGGGS (SEQ ID NO:139) repeated n times, where n is 1-5 when present, and n is 0 when the linker is absent. In “c”-“e” the attachment of a maleimide group is through a lysine (K) on the end of the (GGGGS)n linker, such as through the epsilon amino group of the lysine. In “d” and “e” the maleimide group is linked to the peptide through an alkyl amide formed with the epsilon amino group of a lysine (K) residue, where m is 1-7.

[0036] FIG. 9 depicts the formation of a conjugated T-Cell-MP homoduplex from an unconjugated T-Cell-MP having a scaffold (in this case an Ig Fc scaffold) shown at (A). The conjugated T-Cell-MP polypeptide from (A) forms a homoduplex as shown in (B) via interactions between the scaffold sequences. The unconjugated homoduplex may be isolated from cells stably or transiently expressing the T-Cell-MP protein. The unconjugated homoduplex, generally in a purified form, is subjected to chemical conjugation by coupling an epitope to the conjugation sites, which is exemplified by the reaction between a cysteine in the β2M polypeptide sequence (e.g., comprising an E44C substitution) and a maleimide labeled peptide to yield the T-Cell-MP-epitope conjugate shown in (C). Excess reactive peptide can be removed or substoichiometric amounts of the reactive epitope (relative to the amount of conjugation sites) can be utilized to produce the conjugated T-Cell-MP homoduplex. The constructs are not limited to the linker sequences shown, which are exemplary of the linkers that may be employed.

[0037] FIG. 10 depicts the formation of a conjugated T-Cell-MP heteroduplex from unconjugated T-Cell-MPs having scaffolds that selectively form heteroduplexes (in this case interspecific knob-in-hole Ig Fc scaffolds) shown at (A). The conjugated T-Cell-MP polypeptides form a heteroduplex as shown in (B) via interactions between the interspecific scaffold sequences. The unconjugated heteroduplex may be isolated from cells stably or transiently expressing the protein. The unconjugated heteroduplex, generally in a purified form, is subjected to chemical conjugation by coupling an epitope to the conjugation sites, which is exemplified by the reaction between a cysteine in the β2M polypeptide sequence (e.g., an E44C substitution) and a maleimide labeled peptide to yield the T-Cell-MP-epitope conjugate shown in (C). Excess reactive peptide can be removed or substoichiometric amounts of the reactive epitope (relative to the amount of conjugation sites) can be utilized to produce the conjugated T-Cell-MP heteroduplex, which as shown may comprise different MODs on each of the T-Cell-MP polypeptides. The constructs are not limited to the linker sequences shown, which are exemplary of the linkers that may be employed.

[0038] FIG. 11 shows three heterodimeric T-Cell-MP-epitope conjugate duplexes. Each has a scaffold comprising an interspecific Ig Fc polypeptide pair; however, the scaffold polypeptides may be replaced by any other interspecific polypeptide pair. The constructs are not limited to the linker sequences shown, which are exemplary of the linkers that may be employed.

[0039] FIG. 12 shows comparative results for the expression of a series of molecules including T-Cell-MPs in cultured CHO cells, described in Example 1, with the molecules (constructs) having varied substitutions in the L3 linker and at other locations. The overall structure of the molecules is provided at A, B, and C. The titer (amount of protein) of the molecules and fraction of the molecules that are unaggregated (e.g., existing as soluble duplexes) are provided in histograms D and E respectively.

[0040] FIG. 13 shows the production and stability in culture of an unconjugated T-Cell-MP (construct 3861, which has an L3 linker consisting of a Gly₄Ser repeated three times) at 2, 4, and 6 million cells per ml at both 32 and 28° over several days (A and B). The chromatograms show protein A purified material from a culture before (C) and after (D) further purification by size exclusion chromatography. The coomassie blue gel (E) shows that materials run against molecular weight standards (Mw) at 103128 Daltons for reduced (R) and 206213 Daltons for non-reduced samples. See Example 2 for details.

[0041] FIG. 14 at A demonstrates the specificity of the T-Cell-MP-epitope conjugates for T cells specific to the conjugated epitope. At B, FIG. 14 shows an electrophoresis gel of non-reduced and reduced samples of epitope conjugates. See Example 3 for details.

[0042] FIG. 15 and FIG. 16 show the response of CD8+ T cells present in Leukopak samples from CMV and MART-1 response donors to T-Cell-MP epitope conjugates and control treatments as described in Example 4.

[0043] FIG. 17 shows the effect of L3 linker length on the CHO cell expression of two series of unconjugated T-Cell-MPs, providing the titer in culture media by Octet analysis at A, and the fraction of unaggregated (duplex) molecules present in the samples at B following purification on protein A magnetic beads.

[0044] FIG. 18 depicts a method of directing T cells (e.g., CD 8+ cytotoxic T-cells) to a target cell (e.g., a cancer cell as shown) and directing the T cell's response to the target cell.

[0045] FIG. 19 provides the amino acid sequences of certain constructs discussed in this disclosure. Linker sequences (e.g., AAAGG and GGGGS) may be bolded, italicized and underlined to permit their identification. The indicated single amino acid substitutions in the MHC class I heavy chain are shown in bold with underlining Human IL2 sequences are indicated by hIL2, beta-2-microglobin sequences are indicated by β2M, and HLA-A02 sequences are indicated by HLA-A*0201, with each bearing the indicated aa substitutions.

### DEFINITIONS

[0046] The term T-Cell-MP is generic to, and includes, both unconjugated T-Cell-MPs and T-Cell-MP-epitope conjugates. The term “unconjugated T-Cell-MP (or “MPs” when plural) refers to T-Cell-MPs that have not been conjugated (covalently linked) to an epitope and/or payload (e.g., a non-epitope molecule such as a label), and therefore comprise at least one chemical conjugation site. Unconjugated T-Cell-MP polypeptides also do not comprise a fused peptide epitope that can be positioned within the MHC-H binding cleft and in conjunction with the β2M polypeptide sequence and presented to a TCR. The terms “T-Cell-MP-epitope conjugate” (or “conjugates” when plural) refers to T-Cell-MPs that have been conjugated (covalently linked) to an epitope at a chemical conjugation site that permits the covalently linked epitope to be present in the MHC binding cleft and presented to a TCR with specificity for the epitope expressed on a T Cell (an epitope specific T cell). “T-Cell-MP-payload conjugate” and “T-Cell-MP-payload conjugates” refer to T-Cell-MPs that have been conjugated (covalently linked) to one or more independently selected payloads. The term “T-Cell-MP” also includes unconjugated T-Cell-MPs and T-Cell MP-epitope conjugates that either comprise one or more independently selected MODs or are MOD-less. In those instances where this disclosure specifically refers to a T-Cell-MP that does not contain a MOD, terms such as “MOD-less T-Cell-MP” or a “T-Cell-MP without a MOD” and the like are employed. The term “T-Cell-MP” also includes unconjugated T-Cell-MPs and T-Cell MP-epitope conjugates that comprise either one or more independently selected targeting sequences (discussed below).

[0047] The terms “polynucleotide” and “nucleic acid,” used interchangeably herein, refer to a polymeric form of nucleotides of any length, either ribonucleotides or deoxyribonucleotides. Thus, these terms include, but are not limited to, single-, double-, or multi-stranded DNA or RNA, genomic DNA, cDNA, DNA-RNA hybrids, or a polymer comprising purine and pyrimidine bases or other natural, chemically or biochemically modified, non-natural, or derivatized nucleotide bases.

[0048] The terms “polypeptide” and “protein,” used interchangeably herein, refer to a polymeric form of amino acids, which unless stated otherwise are the naturally occurring proteinogenic L-amino acids that are incorporated biosynthetically into proteins during translation in a mammalian cell.

[0049] A nucleic acid or polypeptide has a certain percent “sequence identity” to another nucleic acid or polypeptide, meaning that, when aligned, that percentage of bases or amino acids are the same, and in the same relative position, when comparing the two sequences. Sequence identity can be determined in a number of different ways. To determine sequence identity, sequences can be aligned using various convenient methods and computer programs (e.g., BLAST, T-COFFEE, MUSCLE, MAFFT, etc.), available over the world wide web at sites including blast.ncbi.nlm.nih.gov/Blast.cgi for BLAST+2.10.0, ebi.ac.uk/Tools/msa/tcoffee/, ebi.ac.uk/Tools/msa/muscle/, and mafft.cbrc.jp/alignment/software/. See, e.g., Altschul et al. (1990), J. Mol. Biol. 215:403-10.

[0050] As used herein amino acid (“aa” singular or “aas” plural) means the naturally occurring proteinogenic amino acids incorporated into polypeptides and proteins in mammalian cell translation. Unless stated otherwise, these are: L (Leu, leucine), A (Ala, alanine), G (Gly, glycine), S (Ser, serine), V (Val, valine), F (Phe, phenylalanine), Y (Tyr, tyrosine), H (His, histidine), R (Arg, arginine), N (Asn, asparagine), E (Glu, glutamic acid), D (Asp, aspartic acid), C (Cys, cysteine), Q (Gln, glutamine), I (Ile, isoleucine), M (Met, methionine), P (Pro, proline), T (Thr, threonine), K (Lys, lysine), and W (Trp, tryptophan). Amino acid also includes the amino acids, hydroxyproline and selenocysteine, which appear in some proteins found in mammalian cells; however, unless their presence is expressly indicated they are not understood to be included.

[0051] The term “conservative amino acid substitution” refers to the interchangeability in proteins of aa residues having similar side chains. For example, a group of aas having aliphatic side chains consists of glycine, alanine, valine, leucine, and isoleucine; a group of aas having aliphatic-hydroxyl side chains consists of serine and threonine; a group of aas having amide containing side chains consists of asparagine and glutamine; a group of aas having aromatic side chains consists of phenylalanine, tyrosine, and tryptophan; a group of aas having basic side chains consists of lysine, arginine, and histidine; a group of aas having acidic side chains consists of glutamate and aspartate; and a group of aas having sulfur containing side chains consists of cysteine and methionine. Exemplary conservative aa substitution groups are: valine-leucine-isoleucine, phenylalanine-tyrosine, lysine-arginine, alanine-valine-glycine, and asparagine-glutamine.

[0052] The term “binding” (or “bound”) refers generically to a direct association between molecules and/or atoms, due to, for example, covalent, electrostatic, hydrophobic, ionic and/or hydrogen-bond interactions, including interactions such as salt bridges and water bridges.

[0053] The term “binding” (or “bound”) as used with reference to a T-Cell-MP binding to a polypeptide (e.g., a T cell receptor on a T cell) refers to a non-covalent interaction between two molecules. A non-covalent interaction refers to a direct association between two molecules, due to, for example, electrostatic, hydrophobic, ionic, and/or hydrogen-bond interactions, including interactions such as salt bridges and water bridges. Non-covalent binding interactions are generally characterized by a dissociation constant (K_{D}) of less than 10⁻⁶ M, less than 10⁻⁷ M, less than 10⁻⁸ M, less than 10⁻⁹ M, less than 10⁻¹⁰ M, less than 10⁻¹¹ M, less than 10⁻¹² M, less than 10⁻¹³ M, less than 10⁻¹⁴ M, or less than 10⁻¹⁵ M. “Covalent bonding” or “covalent binding” as used herein refers to the formation of one or more covalent chemical bonds between two different molecules.

[0054] “Affinity” as used herein generally refers to the strength of non-covalent binding, increased binding affinity being correlated with a lower K_{D}. As used herein, the term “affinity” may be described by the dissociation constant (K_{D}) for the reversible binding of two agents (e.g., an antibody and an antigen). Affinity can be at least 1-fold greater to at least 1,000-fold greater (e.g., at least 2-fold to at least 5-fold greater, at least 3-fold to at least 6-fold greater, at least 4-fold to at least 8-fold greater, at least 5-fold to at least 10-fold greater, at least 6-fold to at least 15-fold greater, at least 7-fold to at least 20-fold greater, at least 8-fold to at least 30-fold greater, at least 9-fold to at least 35-fold greater, at least 10-fold to at least 40-fold greater, at least 20-fold to at least 60-fold greater, at least 40-fold to at least 80-fold greater, at least 60-fold to at least 180-fold greater, at least 80-fold to at least 240-fold greater, at least 100-fold to at least 1,000-fold greater, or at least 1,000-fold greater) than the affinity of an antibody or receptor for an unrelated aa sequence (e.g., ligand). Affinity of an antibody to a target protein can be, for example, from about 100 nanomolar (nM) to about 0.1 nM, from about 100 nM to about 1 picomolar (pM), or from about 100 nM to about 1 femtomolar (fM) or more. As used herein, the term “avidity” refers to the resistance of a complex of two or more agents to dissociation after dilution.

[0055] The term “immunological synapse” or “immune synapse” as used herein generally refers to the natural interface between two interacting immune cells of an adaptive immune response including, e.g., the interface between an antigen-presenting cell (APC) or target cell and an effector cell, e.g., a lymphocyte, an effector T cell, a natural killer cell, and the like. An immunological synapse between an APC and a T cell is generally initiated by the interaction of a T cell antigen receptor and MHC molecules, e.g., as described in Bromley et al., Ann. Rev. Immunol. 2001; 19:375-96; the disclosure of which is incorporated herein by reference in its entirety.

[0056] “T cell” includes all types of immune cells expressing CD3, including T-helper cells (CD4⁺ cells), cytotoxic T cells (CD8⁺ cells), regulatory T cells (T reg), and NK-T cells.

[0057] The term “immunomodulatory polypeptide” (also referred to as a “costimulatory polypeptide” or, as noted above, a “MOD”) as used herein includes a polypeptide or portion thereof (e.g., an ectodomain) on an APC (e.g., a dendritic cell, a B cell, and the like), or otherwise available to interact with the T cell, that specifically binds a cognate co-immunomodulatory polypeptide (“Co-MOD”) present on a T cell, thereby providing a signal. The signal provided by the MOD engaging its Co-MOD, in addition to the primary signal provided by, for instance, binding of a TCR/CD3 complex with a MHC polypeptide loaded with a peptide epitope, mediates (e.g., directs) a T cell response. The responses include, but are not limited to, proliferation, activation, differentiation, and the like. A MOD can include, but is not limited to, CD7, B7-1 (CD80), B7-2 (CD86), PD-L1, PD-L2, 4-1BBL, OX40L, Fas ligand (FasL), inducible costimulatory ligand (ICOS-L), intercellular adhesion molecule (ICAM), CD30L, CD40, CD70, CD83, HLA-G, lymphotoxin beta receptor, 3/TR6, ILT3, ILT4, HVEM, an agonist or antibody that binds Toll-Like Receptor (TLR), and a ligand that specifically binds with B7-H3. A MOD also encompasses, inter alia, an antibody or antibody fragment that specifically binds with and activates a Co-MOD molecule present on a T cell such as, but not limited, to antibodies against the receptors for any of IL-2, CD27, CD28, 4-1BB, OX40, CD30, CD40, PD-1, ICOS, lymphocyte function-associated antigen-1 (LFA-1), CD2, LIGHT (also known as tumor necrosis factor superfamily member 14 (TNFSF14)), NKG2C, B7-DC, B7-H2, B7-H3, and CD83.

[0058] “Recombinant” as used herein means that a particular nucleic acid (DNA or RNA) is the product of various combinations of cloning, restriction, polymerase chain reaction (PCR) and/or ligation steps resulting in a construct having a structural coding or non-coding sequence distinguishable from endogenous nucleic acids found in natural systems. DNA sequences encoding polypeptides can be assembled from cDNA fragments or from a series of synthetic oligonucleotides, to provide a synthetic nucleic acid which is capable of being expressed from a recombinant transcriptional unit contained in a cell or in a cell-free transcription and translation system.

[0059] The terms “recombinant expression vector” or “DNA construct,” used interchangeably herein, refer to a DNA molecule comprising a vector and at least one insert. Recombinant expression vectors are usually generated for the purpose of expressing and/or propagating the insert(s), or for the construction of other recombinant nucleotide sequences. The insert(s) may or may not be operably linked to a promoter sequence and may or may not be operably linked to DNA regulatory sequences.

[0060] The terms “treatment,” “treating” and the like are used herein to generally mean obtaining a desired pharmacologic and/or physiologic effect. The effect may be prophylactic in terms of completely or partially preventing a disease or symptom thereof and/or may be therapeutic in terms of a partial or complete cure for a disease and/or adverse effect attributable to the disease. “Treatment” as used herein covers any treatment of a disease or symptom in a mammal, and includes: (a) preventing the disease or symptom from occurring in a subject which may be predisposed to acquiring the disease or symptom but has not yet been diagnosed as having it; (b) inhibiting the disease or symptom, i.e., arresting its development; and/or (c) relieving the disease, i.e., causing regression of the disease. The therapeutic agent may be administered before, during or after the onset of disease or injury. The treatment of ongoing disease, where the treatment stabilizes or reduces the undesirable clinical symptoms of the patient, is of particular interest. Such treatment is desirably performed prior to complete loss of function in the affected tissues. The subject therapy will desirably be administered during the symptomatic stage of the disease and, in some cases, after the symptomatic stage of the disease.

[0061] The terms “individual,” “subject,” “host,” and “patient” are used interchangeably herein and refer to any mammalian subject for whom diagnosis, treatment, or therapy is desired. Mammals include humans and non-human primates, and in addition include rodents (e.g., rats; mice), lagomorphs (e.g., rabbits), ungulates (e.g., cows, sheep, pigs, horses, goats, and the like), felines, canines, etc.

[0062] Before the present invention is further described, it is to be understood that this invention is not limited to the particular embodiments described, as such may, of course, vary. It is also to be understood that the terminology used herein is for the purpose of describing particular embodiments only, and is not intended to limit the scope of the invention.

[0063] Where a range of values is provided, it is understood that each intervening value between the upper and lower limit of that range to a tenth of the lower limit of the range is encompassed within the disclosure along with any other stated or intervening value in the range. Upper and lower limits may independently be included in smaller ranges that are also encompassed within the disclosure subject to any specifically excluded limit in the stated range. Where the stated range has a value (e.g., an upper or lower limit), ranges excluding those values are also included in the invention.

[0064] Unless defined otherwise, all technical and scientific terms used herein have the same meaning as commonly understood by one of ordinary skill in the art to which this invention belongs. Although any methods and materials similar or equivalent to those described herein can also be used in the practice or testing of the present invention, the preferred methods and materials are now described. All publications mentioned herein are incorporated herein by reference to disclose and describe the methods and/or materials in connection with which the publications are cited.

[0065] It must be noted that, as used herein and in the appended claims, the singular forms “a,” “an,” and “the” include plural referents unless the context clearly dictates otherwise. Thus, for example, reference to “a T reg” includes a plurality of such T regs and reference to “the MHC Class I heavy chain” includes reference to one or more MHC Class I heavy chains and equivalents thereof known to those skilled in the art, and so forth. It is further noted that the claims may be drafted to exclude any optional element. As such, this statement is intended to serve as antecedent basis for use of such exclusive terminology as “solely,” “only” and the like in connection with the recitation of claim elements, or use of a “negative” limitation.

[0066] It is appreciated that certain features of the invention, which are, for clarity, described in the context of separate embodiments, may also be provided in combination in a single embodiment. Conversely, various features of the invention, which are, for brevity, described in the context of a single embodiment, may also be provided separately or in any suitable sub-combination. All combinations of the embodiments pertaining to the invention are specifically embraced by the present invention and are disclosed herein just as if each and every combination was individually and explicitly disclosed. In addition, all sub-combinations of the various embodiments and elements thereof are also specifically embraced by the present invention and are disclosed herein just as if each and every such sub-combination was individually and explicitly disclosed herein.

[0067] The publications discussed herein are provided solely for their disclosure prior to the filing date of the present application. Nothing herein is to be construed as an admission that the present invention is not entitled to antedate such publications by virtue of prior invention. Further, the dates of publication provided may be different from the actual publication dates which may need to be independently confirmed.

### DETAILED DESCRIPTION

### I. T-Cell Modulatory Polypeptides (T-Cell-MPs) with Chemical Conjugation Sites for Epitope Binding

[0068] The present disclosure includes and provides for T-Cell-MPs (both unconjugated T-Cell-MPs having a chemical conjugation site suitable for attaching an epitope and T-Cell-MP-epitope conjugates to which an epitope has been conjugated). Such T-Cell-MPs are useful for modulating the activity of T cells to, for example, modulate an immune response in vitro, ex vivo, or in vivo, and accordingly to effect therapeutic treatments. The present disclosure specifically provides methods of T-Cell MP-epitope conjugate preparation and use in modulating an immune response in vitro, ex vivo, or in vivo in an individual that may be a human or non-human test subject or patient. The human or non-human test subject or patient may be suffering from one or more tumors, one or more cancers, and/or one or more infections (e.g., bacterial and viral infections). In addition to the other elements present the T-Cell-MPs may comprise one or more independently selected wt. and/or variant MOD polypeptides that exhibit reduced binding affinity to their Co-MODs and one or more payloads.

[0069] Included in this disclosure are T-Cell-MPs that are homodimeric, comprising identical first and second T-Cell-MP polypeptides. Also included in this disclosure are T-Cell-MPs that are heterodimeric, comprising a first and a second T-Cell-MP polypeptide, wherein at least one of those polypeptides comprises a chemical conjugation site for the attachment of an epitope. Optionally at least one of the heterodimers may comprise a payload such as a chemotherapeutic agent and/or a targeting sequence. Included in this disclosure are T-Cell-MPs which have been chemically conjugated to an epitope to form a T-Cell-MP-epitope conjugate and which optionally comprise a targeting sequence and/or a payload.

[0070] Depending on the type of MOD(s) present in a T-Cell-MP-epitope conjugate, a T cell bearing a TCR specific to the epitope is present on a T-Cell-MP can respond by undergoing activation including, for example, clonal expansion (e.g., when activating MODs such as wt. and/or variants of IL-2, 4-1BBL and/or CD80 that are incorporated into the T-Cell-MP). Alternatively, the T cell may undergo inhibition that down regulates T cell activity when MODs such as wt. and/or variants of FASL and/or PD-L1 are incorporated into the T-Cell-MPs. The incorporation of combinations of MODs such as wt. and/or variants of IL-2 and CD80 or IL2 and PD-L1 into T-Cell-MPs (e.g., T-Cell-MP-epitope conjugates) may lead to synergistic effects where the T cell response more than exceeds the sum of the responses of T cells to otherwise identical T-Cell-MPs lacking one of the MODs. Because MODs are not specific to any epitope, activation or inhibition of T cells can be biased toward epitope-specific interactions by incorporating variant MODs having reduced affinity for their Co-MOD into the T-Cell-MPs such that the binding of a T-Cell-MP to a T cell is strongly affected by, or even dominated by, the MHC-epitope-TCR interaction.

[0071] A T-Cell-MP-epitope conjugate bearing MODs may be considered to function as a surrogate APC and, by interacting with a T-Cell, mimic the presentation of epitope in an adaptive immune response. The T-Cell-MP-epitope conjugate does so by engaging and presenting to a TCR present on the surface of a T cell with a covalently bound epitope (e.g., a peptide presenting an epitope). This engagement provides the T-Cell-MP-epitope conjugate with the ability to achieve epitope-specific cell targeting. In embodiments described herein, T-Cell-MP-epitope conjugates also possess at least one MOD that engages a counterpart costimulatory protein (Co-MOD) on the T cell. Both signals—epitope/MHC binding to a TCR and MOD binding to a Co-MOD—then drive both the desired T cell specificity and either inhibition/apoptosis or activation/proliferation.

[0072] Unconjugated T-Cell-MPs, which have chemical conjugation sites, find use as a platform into which different epitopes may be introduced, either alone or in combination with one or more additional payloads added to the T-Cell-MP, in order to prepare materials for therapeutic, diagnostic and research applications. Because T-Cell-MPs, including duplexes comprised of homodimers, and higher order homomeric complexes require only a single polypeptide sequence, they can advantageously be introduced and expressed by cells using a single vector with a single expression cassette. Similarly, heterodimeric duplex T-Cell-MPs can be introduced into cells using a single vector with two separate expression cassettes or a bicistronic expression cassette (e.g. with the proteins separated by a 2A protein sequence or internal ribosome entry sequence (IRES)), or by using two vectors each bearing a cassette coding one heterodimeric subunit. Where duplex or higher order T-Cell-MPs contain interspecific scaffold sequences, the different T-Cell-MPs may bear different MODs permitting the duplex or higher order structure to contain different MODs, or MODs at different locations on each polypeptide of the heterodimer. The modular nature of T-Cell-MPs enables the rapid preparation and testing of diagnostic and therapeutic candidates by coupling an epitope containing molecule (e.g., a peptide) into prepared T-Cell-MP polypeptides that can then be tested for activation or inhibition of T cells bearing TCRs specific to the epitope. The ability to construct unconjugated T-Cell-MPs, and in particular heterodimer T-Cell-MP duplexes with different MODs, permits rapid assembly and assessment of different combinations of MODs with one or more epitope relevant to a disease state or condition. Further to the foregoing, the ability to rapidly attach and access the effectiveness of various payloads, such as antiviral agents, chemotherapeutics, and/or targeting sequences, to the T-Cell-MP facilitates preparation of T-Cell-MPs both for screening and as therapeutics.

[0073] Where one or more activating wt. MOD or variant MOD polypeptide sequences are incorporated into a T-Cell-MP epitope conjugate, contacting the T cells with a TCR specific to the epitope with at least one concentration of the T-Cell-MP-epitope conjugate can result in T cell activation. T cell activation may result in one or more of the following: an increase in the activity of ZAP-70 protein kinase activity, induction in the proliferation of the T-cell(s), granule-dependent effector actions (e.g., the release of granzymes, perforin, and/or granulysin from cytotoxic T-cells), and/or release of T cell cytokines (e.g., interferon γ from CD8+ cells). Where the MOD polypeptide sequence(s) induces T cell proliferation, the T-Cell-MP epitope conjugate may induce at least a twofold (e.g., at least a 2, 3, 4, 5, 10, 20, 30, 50, 75, or 100 fold) difference in the activation of T cells having a TCR specific to the epitope as compared to T cells contacted with the same concentration of the T-Cell-MP-epitope conjugate that do not have a TCR specific to the epitope (see FIG. 1). Activation of T-cells may be measured by, for example, ZAP-70 activity or T cell proliferation (see, e.g., Wang, et al., Cold Spring Harbor perspectives in biology 2.5 (2010): a002279), or cytokine release. Where one or more wt. or variant MOD polypeptide sequences that inhibit T cell activation are incorporated into a T-Cell-MP-epitope conjugate, contacting the T cells having a TCR specific to the epitope with at least one concentration of the T-Cell-MP-epitope conjugate may result in one or more of the following: prevention or inhibition of the T cell's activation, reduction in the response of activated T cells, and/or down regulation of the epitope-specific T-Cell. In some cases, inhibitory MODs present in a T-Cell-MP-epitope conjugate may result in apoptosis of T cell(s) with a TCR specific to the epitope. The effects of inhibitory MOD sequences may be measured by, for example, one or more of their: effect on T cell proliferation, ZAP-70 activity, reduction in granule-dependent effector actions, and/or cell death.

[0074] The specificity of T-Cell-MP-epitope conjugates depends on the relative contributions of the epitope and its MODs to the binding. Where the affinity of the MOD(s) for the Co-MOD(s) is relatively high such that the MOD(s) dominate the T-Cell-MPs in the binding interactions, the specificity of the T-Cell-MP-epitope conjugates will be reduced relative to T-Cell-MP complexes where the epitope dominates the binding interactions by contributing more to the overall binding energy than the MODs. The greater the contribution of binding energy between an epitope and a TCR specific to the epitope, the greater the specificity of the T-Cell-MP will be for the T cell bearing that type of TCR. Where an epitope MHC complex has strong affinity for its TCR, the use of wt. MODs that have relatively low affinity and/or variant MODs with reduced affinity for their Co-MODs will favor epitope selective interactions of the T-Cell-MP-epitope conjugates with specific T cells, and also facilitate selective delivery of any payload that may be conjugated to the T-Cell-MP-epitope conjugate to the T cell and/or locations where the T cell is located.

[0075] The present disclosure provides T-Cell-MP-epitope conjugates presenting cancer and/or infectious agent (e.g., viral, bacterial) epitopes that are useful for modulating the activity of T cells in an epitope-specific manner and, accordingly, for modulating an immune response to those disease states in an individual. The T-Cell-MPs comprise one or more MODs that are wt. and/or exhibit reduced binding affinity to a Co-MOD.

[0076] A. Unconjugated T-Cell-MPs and T-Cell-MP-Epitope Conjugates

[0077] 1 The Structure and Composition of Unconjugated T-Cell-MPs and T-Cell-MP-Epitope Conjugate Components

[0078] The unconjugated T-Cell-MPs described herein comprise a chemical conjugation site for coupling an epitope directly, or indirectly through a linker. The chemical conjugation site can be situated at any location on the T-Cell-MP. One aspect of the disclosure is directed to T-Cell-MPs that comprise a chemical conjugation site for the attachment of a peptide epitope within the scaffold (e.g., Ig Fc), β2M, or MHC-H polypeptide sequences, or within the linker (L3) joining the β2M and MHC-H polypeptide sequences, and higher order complexes of those T-Cell-MPs. Another aspect of the disclosure is directed to T-Cell-MPs that comprise a chemical conjugation site for the attachment of a peptide epitope within the β2M, or MHC-H polypeptide sequences, or within the linker (L3) joining the β2M and MHC-H polypeptide sequences, and higher order complexes of those T-Cell-MPs. A chemical conjugation site for coupling an epitope directly, or indirectly through a linker, can be situated in the β2M polypeptide sequence. A chemical conjugation site for coupling an epitope directly, or indirectly through a linker, can be situated in the MHC-H polypeptide sequence. A chemical conjugation site for coupling an epitope directly, or indirectly through a linker, can be situated in the linker (L3) joining the β2M polypeptide sequence and MHC-H polypeptide sequence. A chemical conjugation site for coupling an epitope directly, or indirectly through a linker, can be situated within the scaffold (e.g., Ig Fc). Where a chemical conjugation site for coupling an epitope to an unconjugated T-Cell-MP appears in a scaffold (e.g., an Ig Fc), β2M, or MHC-H polypeptide sequence, the chemical conjugation site may be limited to an amino acid or sequence of amino acids not naturally appearing in any of those sequences, and may involve one or more amino acids introduced into one of those sequences (e.g., one or more aas introduced into an aa sequence position at which the one or more aas do not appear in the naturally occurring sequence). In addition, while it is possible to utilize the N-terminal amino group or C-terminal carboxyl group of a T-Cell-MP polypeptide as a chemical conjugation site for epitope attachment, those sites may be excluded as conjugation sites from any of the T-Cell-MPs or their higher order complexes described herein. Indeed, the chemical conjugation site of a T-Cell-MP may be excluded from the N-terminal 10 or 20 aas and/or the C-terminal 10 or 20 aas.

[0079] T-Cell-MPs may form higher order complexes (e.g., duplexes, triplexes, etc.). The higher order complexes may be homomeric (e.g., homodimers or homoduplexes) or heteromeric (e.g., heterodimers or heteroduplexes). Pairs of interspecific sequences may be employed as scaffold sequences where the complexes are intended to be heterodimeric as they permit two different T-Cell-MPs to form a specific heteroduplex, as opposed to a mixture of homoduplexes and heteroduplexes that can form if two T-Cell-MPs not having a pair of interspecific binding sequences are mixed.

[0080] A first group of T-Cell-MP molecules described herein is broadly directed to T-Cell-MPs that may form a duplex that associates through interactions in their scaffold sequences. Such T-Cell-MPs may have at least a first T-Cell-MP polypeptide sequence (e.g., duplexed as a homodimer), or non-identical first and second T-Cell-MP polypeptide sequences (e.g., duplexed as a heterodimer), with one or both of the T-Cell-MPs comprising (e.g., from N-terminus to C-terminus):
[0081] (i) optionally one or more MOD polypeptide sequences (e.g., two or more MOD polypeptide sequences, such as in tandem, wherein when there are two or more MOD polypeptide sequences they are optionally joined to each other by independently selected L1 linkers);
[0082] (ii) an optional L2 linker polypeptide sequence joining the one or more MOD polypeptide sequences to a β2M polypeptide sequence;
[0083] (iii) the β2M polypeptide sequence;
[0084] (iv) an optional L3 linker polypeptide sequence (e.g., from 10-50 aa in length);
[0085] (v) a class I MHC-H polypeptide sequence;
[0086] (vi) an optional L4 linker polypeptide sequence;
[0087] (vii) a scaffold polypeptide sequence (e.g., an immunoglobulin Fc sequence);
[0088] (viii) an optional L5 linker polypeptide sequence; and
[0089] (ix) optionally one or more MOD polypeptide sequence (e.g., two or more MOD polypeptide sequences, such as in tandem, wherein when there are two or more MOD polypeptide sequences they are optionally joined to each other by independently selected L6 linkers);
[0090] wherein the unconjugated T-Cell-MP comprises at least one MOD polypeptide sequence (e.g., the MOD(s) of element (i) and/or (ix)); and
[0091] wherein at least one of the β2M polypeptide sequence, the L3 linker polypeptide sequence, and/or the MHC-H polypeptide sequence comprises at least one chemical conjugation site.

[0092] A second group of unconjugated T-Cell-MPs described herein may form a duplex between a first T-Cell-MP and a second T-Cell-MP that associate through interactions in their scaffold sequences. Such unconjugated duplex T-Cell-MPs may have an identical first and second T-Cell-MP polypeptide sequence duplexed as a homodimer, or non-identical first and second T-Cell-MP polypeptide sequences duplexed as a heterodimer, with one or both of the T-Cell-MPs comprising from N-terminus to C-terminus:
[0093] (i) optionally one or more MOD polypeptide sequences (e.g., two or more MOD polypeptide sequences, such as in tandem, wherein when there are two or more MOD polypeptide sequences they are optionally joined to each other by independently selected L1 linkers);
[0094] (ii) an optional L2 linker polypeptide sequence joining the one or more optional MOD polypeptide sequences to a β2M polypeptide sequence;
[0095] (iii) the β2M polypeptide sequence;
[0096] (iv) an optional L3 linker polypeptide sequence (e.g., from 10-50 aa in length);
[0097] (v) a class I MHC-H polypeptide sequence;
[0098] (vi) an optional L4 linker polypeptide sequence;
[0099] (vii) a scaffold polypeptide sequence (e.g., an immunoglobulin Fc sequence);
[0100] (viii) an optional L5 linker polypeptide sequence; and
[0101] (ix) optionally one or more MOD polypeptide sequence (e.g., two or more MOD polypeptide sequences, such as in tandem, wherein when there are two or more MOD polypeptide sequences they are optionally joined to each other by independently selected L6 linkers);
[0102] wherein the unconjugated T cell modulatory polypeptide comprises at least one MOD polypeptide sequence (e.g., the MOD(s) of element (i) and/or (ix)); and
[0103] wherein at least one of the β2M polypeptide sequence, the L3 linker polypeptide sequence, and/or the MHC-H polypeptide sequence comprises at least one chemical conjugation site, e.g., for epitope conjugation and/or payload conjugation.

[0104] A third group of unconjugated T-Cell-MPs described herein appears as a duplex between a first T-Cell-MP and a second T-Cell-MP that associate through interactions in their scaffold sequences. Such unconjugated duplex T-Cell-MPs may have an identical first and second T-Cell-MP polypeptide sequence duplexed as a homodimer, or non-identical first and second T-Cell-MP polypeptide sequences duplexed as a heterodimer, with one or both of the T-Cell-MPs comprising from N-terminus to C-terminus:
[0105] (i) optionally one or more MOD polypeptide sequences (e.g., two or more MOD polypeptide sequences, such as in tandem, wherein when there are two or more MOD polypeptide sequences they are optionally joined to each other by independently selected L1 linkers);
[0106] (ii) an optional L2 polypeptide sequence joining the one or more optional MOD polypeptide sequences to a β2M polypeptide sequence;
[0107] (iii) the β2M polypeptide sequence;
[0108] (iv) an L3 linker polypeptide sequence comprising from 10 to 50 amino acids;
[0109] (v) a class I MHC-H polypeptide sequence comprising cysteines substituted at positions 84 and 139 (see FIGS. 3E-3H, e.g., Y84C and A139C substitutions) and forming a disulfide bond;
[0110] (vi) an L4 linker polypeptide sequence;
[0111] (vii) an interspecific or non-interspecific immunoglobulin Fc scaffold sequence;
[0112] (viii) an L5 linker polypeptide sequence; and
[0113] (ix) optionally one or more MOD polypeptide sequence (e.g., two or more MOD polypeptide sequences, such as in tandem, wherein when there are two or more MOD polypeptide sequences they are optionally joined to each other by independently selected L6 linkers);
[0114] wherein at least one of the β2M polypeptide sequence, the L3 linker polypeptide sequence, and/or the MHC-H polypeptide sequence comprises at least one chemical conjugation site, e.g., for epitope conjugation and/or payload conjugation; wherein at least one of the β2M polypeptide sequence, the L3 linker polypeptide sequence, or the MHC-H polypeptide sequence comprises a chemical conjugation site that does not appear in a wt. sequence; and
[0115] wherein the first and second T-Cell-MPs are optionally covalently linked through at least one disulfide bond between their Ig Fc scaffold sequence. The chemical conjugation site should be suitable for epitope conjugation in that it does not interfere with the interactions of the T-Cell-MP with a TCR and is preferably solvent accessible permitting its conjugation to the epitope.

[0116] The chemical conjugation sites for epitope conjugation to T-Cell-MPs, including those of the above-mentioned first, second, and third groups of unconjugated T-Cell-MPs, permit the covalent attachment of an epitope presenting molecule (e.g., a peptide epitope) to the T-Cell-MP such that it can be bound (located in the binding cleft) by the MHC-H polypeptide and presented to a TCR. The chemical conjugation sites of an unconjugated T-Cell-MP may be one that does not appear in a wt. sequence (e.g., they are created using the techniques of protein engineering based in biochemistry and/or molecular biology). The chemical conjugation site should also be suitable for epitope conjugation in that it does not interfere with the interactions of the T-Cell-MP with a TCR, and is preferably solvent accessible, permitting its conjugation to the epitope.

[0117] It is understood that the unconjugated T-Cell-MPs do not comprise a peptide epitope (either covalently attached to, or as a fusion with, the T-Cell-MP polypeptide) that can be located in the binding cleft of the MHC-H/β2M polypeptide sequences and presented to a TCR. The disclosure does, however, include and provide for T-Cell-MP-epitope conjugates further comprising a molecule presenting an epitope that is directly or indirectly (e.g., through a peptide or non-peptide linker) covalently attached to the T-Cell-MP at a chemical conjugation site; where the epitope can also be associated with (located in or positioned in) the binding cleft of the T-Cell-MP MHC-H polypeptide sequence and functionally presented to a T cell bearing a TCR specific for the epitope, leading to TCR mediated activation or inhibition of the T cell.

[0118] The disclosure also provides T-Cell-MPs in which the epitope present in a T-Cell-MP-epitope conjugate of the present disclosure may bind to a TCR (e.g., on a T cell) with an affinity of at least 100 micro molar (μM) (e.g., at least 10 μM, at least 1 μM, at least 100 nM, at least 10 nM, or at least 1 nM).

[0119] A T-Cell-MP-epitope conjugate may bind to a first T cell with an affinity that is higher than the affinity with which the T-Cell-MP-epitope conjugate binds to a second T cell; where the first T cell expresses on its surface a Co-MOD and a TCR that binds the epitope, and where the second T cell expresses on its surface the same Co-MOD present on the first T cell, but does not express on its surface a TCR that binds the epitope (e.g., as tightly as the TCR of the first cell if it binds at all). See FIG. 1. The increased affinity may be measured in binding assays or inferred from the concentration of the T-Cell-MP epitope conjugate required to stimulate the first as compared to the second T cell. The increased affinity for epitope-specific T cells permits the use of the epitope conjugates as agents for clinical testing, diagnostics, and as therapeutics capable of directing epitope-specific T cell actions.

[0120] MODs present in T cell-MPs are independently selected wt. MODs and/or variant MODs. Where the T cell-MP forms a heteromeric complex, such as through the use of interspecific scaffold polypeptide sequences, the MODs presented in at least one of the T-Cell-MPs of the heteromer may be selected independently from the other T-Cell-MPs of the heteromeric complex. Accordingly, a heterodimeric duplex T-Cell-MP may have independently selected MODs that are different in the first and second T-Cell-MPs of the duplex. MODs in one aspect are selected to be one or more activating wt. MODs and/or variant MODs capable of stimulating epitope-specific T cell activation/proliferation (e.g., wt. and/or variant IL-2, 4-1BBL and/or CD80). In another embodiment, the MODs are one or more inhibitory wt. MODs and/or variant MODs capable of inhibiting T cell activation/proliferation (e.g., FAS-L and/or PD-L1). When used in conjunction with a T-Cell-MP bearing a suitable epitope, such activating or inhibitory MODs are capable of epitope-specific T cell action, particularly where the MODs are variant MODs and the MHC-epitope-TCR interaction is sufficiently strong to dominate the interaction of the T-Cell-MP with the T cells.

### 2 Chemical Conjugation Sites of Unconjugated T-Cell-MPs

[0121] The term “chemical conjugation site” means any suitable site of a T-Cell-MP that permits the selective formation of a direct or indirect (through an intervening linker or spacer) covalent linkage between the T-Cell-MP and an epitope- or payload-containing molecule. Chemical conjugation sites of unconjugated T-Cell-MPs may be (i) active, i.e., capable of forming a direct or indirect (through an intervening linker or spacer) covalent linkage between the T-Cell-MP and an epitope or payload without an additional chemical reaction or transformation of the chemical conjugation site (e.g., a solvent-accessible cysteine sulfhydryl), or (ii) nascent, i.e., requiring a further chemical reaction or enzymatic transformation of the chemical conjugation site to become an active chemical conjugation site (e.g., a sulfatase sequence not yet activated by an fGly enzyme).

[0122] The term “selective formation” means that when an epitope- or payload-containing molecule bearing a moiety that is reactive with an active chemical conjugation site of a T-Cell-MP, the epitope- or payload-containing molecule will be covalently bound to the chemical conjugation site in an amount higher than to any other site in the T-Cell-MP.

[0123] Chemical conjugation sites may be introduced into a T-Cell-MP using protein engineering techniques (e.g., by use of an appropriate nucleic acid sequence) to achieve a T-Cell-MP having a desired aa sequence. Chemical conjugation sites can be individual aas (e.g., a cysteine or lysine) or aa sequences (e.g., sulfatase, sortase or transglutaminase sequences) in a protein or polypeptide sequence of the T-Cell-MP.

[0124] Where the protein or polypeptide sequence of the T-Cell-MP is derived from a naturally occurring protein (e.g., the B2M, MHC-H or an IgG scaffold), the chemical conjugation site may be a site not appearing in the naturally occurring sequence, such as a site resulting from amino acid substitutions (e.g., cysteine substitutions), insertions, and or deletions. The chemical conjugation site may also be a sequence, or part of a sequence, that is not derived from a naturally occurring protein, such as a linker sequence (e.g., the L3 linker of a T-Cell-MP connecting the β2M and MHC-H polypeptide sequences of a T-Cell-MP).

[0125] In some embodiments, there is only one chemical conjugation site (e.g., one chemical conjugation site added by protein engineering) in each unconjugated T-Cell-MP polypeptide that permits an epitope to be covalently attached such that it can be located in the MHC polypeptide binding cleft and presented to a TCR. Each individual unconjugated T-Cell-MP may comprise more than one chemical conjugation sites that are selected to be either the same or different types of chemical conjugation sites, thereby permitting the same or different molecules (e.g., an epitope and one or more payloads) to be selectively conjugated to each of the chemical conjugation sites. Accordingly, each individual or duplexed unconjugated T-Cell-MP may comprise one or more chemical conjugations sites that are selected to be either the same or different types of chemical conjugation sites, thereby permitting the same or different molecules to be selectively conjugated to each of the chemical conjugation sites. The chemical conjugations sites (e.g., for the conjugation of epitope) generally will be the same (e.g., of the same type) so that epitope presenting molecules can be covalently attached to all of the desired sites in, for example, a duplex unconjugated T-Cell-MP, using a single reaction. T-Cell-MPs may contain chemical conjugation sites in addition to those for the conjugation to an epitope, including conjugation sites for the incorporation of, for example, targeting sequences and/or payloads such as labels.

[0126] Chemical conjugation sites used to incorporate molecules other than epitope presenting molecules will, in most instances, be of a different type (e.g., utilize different chemical reactions) and in different locations than the sites used to incorporate epitopes, thereby permitting different molecules to be selectively conjugated to each of the polypeptides. Where a T-Cell-MP is to comprise a targeting sequence and/or one or more payload molecules, the unconjugated T-Cell-MP may comprise more than one copy of a chemical conjugation site (e.g., chemical conjugation sites added by protein engineering) to permit attachment to multiple molecules of targeting sequence and/or payload.

[0127] Chemical conjugation sites that may be incorporated into unconjugated T cell-MP polypeptides, include, but are not limited to:
[0128] a) peptide sequences that act as enzyme modification sequences (e.g., sulfatase, sortase, and/or transglutaminase sequences);
[0129] b) non-natural aas and/or selenocysteines;
[0130] c) chemical conjugation sites comprising individual amino acids;
[0131] d) carbohydrate or oligosaccharide moieties; and
[0132] e) IgG nucleotide binding sites.

[0133] a. Sulfatase Motifs

[0134] In those embodiments where enzymatic modification is chosen as the means of chemical conjugation, the chemical conjugation site(s) may comprise a sulfatase motif. Sulfatase motifs are usually 5 or 6 aas in length, and are described, for example, in U.S. Pat. No. 9,540,438 and U.S. Pat. Pub. No. 2017/0166639 A1, which are incorporated by reference. Insertion of the motif results in the formation of a protein or polypeptide that is sometimes referred to as aldehyde tagged or having an aldehyde tag. The motif may be acted on by formylglycine generating enzyme(s) (“FGE” or “FGEs”) to convert a cysteine or serine in the motif to a formylglycine residue (“fGly” although sometimes denoted “FGly”), which is an aldehyde containing aa, sometimes referred to as oxoalanine, that may be utilized for selective (e.g., site specific) chemical conjugation reactions. Accordingly, as used herein, “aldehyde tag” or “aldehyde tagged” polypeptides refer to an aa sequence comprising an unconverted sulfatase motif, as well as to an aa sequence comprising a sulfatase motif in which the cysteine or the serine residue of the motif has been converted to fGly by action of an FGE. Where the term sulfatase motif is utilized in the context of an aa sequence, both the nascent chemical conjugation sequence (e.g., a polypeptide containing the unconverted motif) as well as its fGly containing the active chemical conjugation site counterpart are disclosed. Once present in a polypeptide (e.g., of a T-Cell-MP), a fGly residue may be reacted with molecules (e.g., peptide epitopes with or without an intervening linker) comprising a variety of reactive groups including, but not limited to, thiosemicarbazide, aminooxy, hydrazide, and hydrazino groups to form a conjugate (e.g., a T-Cell-MP-epitope conjugate) having a covalent bond between the peptide and the molecule via the fGly residue. Sulfatase motifs may be used to incorporate not only epitopes (e.g., epitope presenting peptides), but also targeting sequences and/or payloads (e.g., in the formation of conjugates with drugs and diagnostic molecules).

[0135] In embodiments, the sulfatase motif is at least 5 or 6 aa residues, but can be, for example, from 5 to 16 (e.g., 6-16, 5-14, 6-14, 5-12, 6-12, 5-10, 6-10, 5-8, or 6-8) aas in length. The sulfatase motif may be limited to a length less than 16, 14, 12, 10, or 8 aa residues.

[0136] In an embodiment, the sulfatase motif comprises the sequence of Formula (I): X1Z1X2Z2X3Z3 (SEQ ID NO:66), where
[0137] Z1 is cysteine or serine;
[0138] Z2 is either a proline or alanine residue (which can also be represented by “P/A”);
[0139] Z3 is a basic aa (arginine, lysine, or histidine, usually lysine), or an aliphatic aa (alanine, glycine, leucine, valine, isoleucine, or proline, usually A, G, L, V, or I);
[0140] X1 is present or absent and, when present, can be any aa, though usually an aliphatic aa, a sulfur-containing aa, or a polar uncharged aa (e.g., other than an aromatic aa or a charged aa), usually L, M, V, S or T, more usually L, M, S or V, with the proviso that, when the sulfatase motif is at the N-terminus of the target polypeptide, X1 is present; and
[0141] X2 and X3 independently can be any aa, though usually an aliphatic aa, a polar, uncharged aa, or a sulfur containing aa (e.g., other than an aromatic aa or a charged aa), usually S, T, A, V, G or C, more usually S, T, A, V or G.

[0142] As indicated above, a sulfatase motif of an aldehyde tag is at least 5 or 6 aa residues, but can be, for example, from 5 to 16 aas in length. The motif can contain additional residues at one or both of the N- and C-termini, such that the aldehyde tag includes both a sulfatase motif and an “auxiliary motif.” In an embodiment, the sulfatase motif includes a C-terminal auxiliary motif (i.e., following the Z3 position of the motif).

[0143] A variety of FGEs may be employed for the conversion (oxidation) of cysteine or serine in a sulfatase motif to fGly. As used herein, the term formylglycine generating enzyme, or FGE, refers to fGly-generating enzymes that catalyze the conversion of a cysteine or serine of a sulfatase motif to fGly. As discussed in U.S. Pat. No. 9,540,438, the literature often uses the term formylglycine-generating enzymes for those enzymes that convert a cysteine of the motif to fGly, whereas enzymes that convert a serine in a sulfatase motif to fGly are referred to as Ats-B-like.

[0144] Sulfatase motifs of Formula (I) amenable to conversion by a prokaryotic FGE often contain a cysteine or serine at Z1 and a proline at Z2 that may be modified either by the “SUMP I-type” FGE or the “Ats-B-like” FGE, respectively. Prokaryotic FGE enzymes that may be employed include the enzymes from Clostridium perfringens (a cysteine type enzyme), Klebsiella pneumoniae (a Serine-type enzyme) or the FGE of Mycobacterium tuberculosis. Where peptides containing a sulfatase motif are being prepared for conversion into fGly-containing peptides by a eukaryotic FGE, for example by expression and conversion of the peptide in a eukaryotic cell or cell-free system using a eukaryotic FGE, sulfatase motifs amenable to conversion by a eukaryotic FGE may advantageously be employed.

[0145] Host cells for production of polypeptides with unconverted sulfatase motifs, or where the cell expresses a suitable FGE for converting fGly-containing polypeptide sequences, include those of a prokaryotic and eukaryotic organism. Non-limiting examples include Escherichia coli strains, Bacillus spp. (e.g., B. subtilis, and the like), yeast or fungi (e.g., S. cerevisiae, Pichia spp., and the like). Examples of other host cells, including those derived from a higher organism such as insects and vertebrates, particularly mammals, include, but are not limited to, HeLa cells (e.g., American Type Culture Collection (ATCC) No. CCL-2), CHO cells (e.g., ATCC Nos. CRL9618 and CRL9096), CHO DG44 cells, CHO-K1 cells (ATCC CCL-61), 293 cells (e.g., ATCC No. CRL-1573), Vero cells, NIH 3T3 cells (e.g., ATCC No. CRL-1658), Hnh-7 cells, BHK cells (e.g., ATCC No. CCL1O), PC12 cells (ATCC No. CRL1721), COS cells, COS-7 cells (ATCC No. CRL1651), RAT1 cells, mouse L cells (ATCC No. CCLI.3), human embryonic kidney (HEK) cells (ATCC No. CRL1573), HLHepG2 cells, and the like.

[0146] Sulfatase motifs may be incorporated into any desired location of a T-Cell-MP. In an embodiment they may be excluded from the amino or carboxyl terminal 10 or 20 amino acids. In an embodiment, a sulfatase motif may be added in (e.g., at or near the terminus) of any T-Cell-MP element, including the MHC-H or β2M polypeptide sequences or any linker sequence joining them (the L3 linker). Sulfatase motifs may also be added to the scaffold polypeptide (e.g., the Ig Fc) or any of the linkers present in the T-Cell-MP (e.g., L1 to L6).

[0147] A sulfatase motif may be incorporated into, or attached to (e.g., via a peptide linker), a β2M polypeptide in a T-Cell-MP with a sequence having at least 85% (e.g., at least 90%, 95%, 98% or 99%, or even 100%) aa sequence identity to at least 50 (e.g., at least 60, 70, 80, 90, 96, 97, or 98 or all) contiguous aas of a mature β2M polypeptide sequence shown in FIG. 4 (e.g., the sequences shown in FIG. 4 starting at aa 21 and ending at their C-terminus). The mature human β2M polypeptide sequence in FIG. 4 may be selected for incorporation of the sulfatase motif. Sequence identity to the β2M polypeptides is determined relative to the corresponding portion of a β2M polypeptide in FIG. 4 without consideration of the added sulfatase motif or any linker or other sequences present.

[0148] In an embodiment, a sulfatase motif may be incorporated into a β2M polypeptide sequence having 1 to 15 (e.g., 1, 2, 3, 4, 5, 6, 7, 8, 9, 10, 11, 12, 13, 14, or 15) aa deletions, insertions and/or changes compared with a sequence shown in FIG. 4 (either an entire sequence shown in FIG. 4, or the sequence of a mature polypeptide starting at aa 21 and ending at its C-terminus). Changes are assessed without consideration of the aas of the sulfatase motif and any linker sequences present. In one such embodiment a sulfatase motif may be placed and/or be inserted within aas 1-15, 15-35, 35-55, 40-50, or 50-70 of a mature β2M sequence, such as those shown in FIG. 4. In one embodiment, sulfatase motifs may be located between aas 35-55 (e.g., between aas 40 to 50) of the human mature β2M polypeptide sequence of FIG. 4 and may have 0 to 15 aa substitutions compared with a sequence shown in FIG. 4 (either an entire sequence shown in FIG. 4, or the sequence of a mature polypeptides starting at aa 21 and ending at its C-terminus).

[0149] A sulfatase motif may be incorporated into, or attached to (e.g., via a peptide linker), a MHC Class I heavy chain polypeptide sequence having at least 85% (e.g., at least 90%, 95%, 98% or 99%, or even 100%) aa sequence identity to at least 150, 175, 200, or 225 contiguous aas of a MHC-H sequence shown in FIGS. 3A to 3I before the addition of the sulfatase motif.

[0150] In an embodiment, the added sulfatase motif is attached to the N- or C-terminus of a T-Cell-MP or, if present, attached to or within a linker located at the N- or C-terminus of the T-Cell-MP.

[0151] U.S. Pat. No. 9,540,438 discusses the incorporation of sulfatase motifs into the various immunoglobulin sequences, including Fc region polypeptides, and is herein incorporated by reference for its teachings on sulfatase motifs and modification of Fc polypeptides and other polypeptides. That patent is also incorporated by reference for its guidance on FGE enzymes, and their use in forming fGly residues, as well as the chemistry related to the coupling of molecules such as epitopes and payloads to fGly residues.

[0152] The incorporation of a sulfatase motif may be accomplished by incorporating a nucleic acid sequence encoding the motif at the desired location in a nucleic acid encoding a T-Cell-MP. As discussed below, the nucleic acid sequence may be placed under the control of a transcriptional regulatory sequence(s) (a promoter) and provided with regulatory elements that direct its expression. The expressed protein may be treated with one or more FGEs after expression and partial or complete purification. Alternatively, expression of the nucleic acid in cells that express a FGE that recognizes the sulfatase motif results in the conversion of the cysteine or serine of the motif to fGly.

[0153] In view of the foregoing, this disclosure provides for T-Cell-MPs comprising one or more fGly residues incorporated into a T-Cell-MP polypeptide chain as discussed above. The fGly residues may, for example, be in the context of the sequence X1(fGly)X2Z2X3Z3, where: fGly is the formylglycine residue; and Z2, Z3, X1, X2 and X3 are as defined in Formula (I) above. Epitopes and/or payloads may be conjugated either directly or indirectly to the reactive formyl glycine of the sulfatase motif directly or through a peptide or chemical linker. After chemical conjugation the T-Cell-MPs comprise one or more fGly′ residues incorporated in the context of the sequence X1(fGly′)X2Z2X3Z3, where the fGly′ residue is formylglycine that has undergone a chemical reaction and now has a covalently attached epitope or payload.

[0154] A number of chemistries and commercially available reagents can be utilized to conjugate a molecule (e.g., an epitope or payload) to a fGly residue, including, but not limited to, the use of thiosemicarbazide, aminooxy, hydrazide, or hydrazino derivatives of the molecules to be coupled at a fGly-containing chemical conjugation site. For example, epitopes (e.g., peptide epitopes) and/or payloads bearing thiosemicarbazide, aminooxy, hydrazide, hydrazino or hydrazinyl functional groups (e.g., attached directly to an aa of a peptide or via a linker such as a PEG) can be reacted with fGly-containing T-Cell-MP polypeptides to form a covalently linked epitope. Similarly, targeting sequences and/or payloads such as drugs and therapeutics can be incorporated using, for example, biotin hydrazide as a linking agent.

[0155] The disclosure provides for methods of preparing conjugated T-Cell-MPs including T-Cell-MP-epitope conjugates and/or T-Cell-MP-payload conjugates comprising:
[0156] a) incorporating a nucleotide sequence encoding a sulfatase motif including a serine or cysteine (e.g., a sulfatase motif of Formula (I) or (II) such as X1CX2PX3Z3 (SEQ ID NO:67); CX1PX2Z3 (SEQ ID NO:68) discussed above) into a nucleic acid encoding an unconjugated T-Cell-MP;
[0157] b) expressing the sulfatase motif-containing unconjugated T-Cell-MP polypeptide in a cell that
   [0158] i) expresses a FGE and converts the serine or cysteine of the sulfatase motif to a fGly and partially or completely purifying the fGly-containing unconjugated T-Cell-MP, or
   [0159] ii) does not express a FGE that converts a serine or cysteine of the sulfatase motif to a fGly, and purifying or partially purifying the T-Cell-MP containing the sulfatase motif and contacting the purified or partially purified T-Cell-MP with a FGE that converts the serine or cysteine of the sulfatase motif into a fGly residue; and
[0160] c) contacting the fGly-containing polypeptides with an epitope and/or payload that has been functionalized with a group that forms a covalent bond between the aldehyde of the fGly and the epitope and/or payload;
[0161] thereby forming a T-Cell-MP-epitope conjugate and/or T-Cell-MP payload conjugate.
   In such methods the epitope (epitope containing molecule) and/or payload may be functionalized by any suitable function group that reacts selectively with an aldehyde group. Such groups may, for example, be selected from the group consisting of thiosemicarbazide, aminooxy, hydrazide, and hydrazino. In an embodiment a sulfatase motif is incorporated into a second T-Cell-MP polypeptide comprising a β2M aa sequence with at least 85% (e.g., at least 90%, 95%, 98% or 99%, or even 100%) sequence identity to at least 60, 70, 80 or 90 contiguous aas of a β2M sequence shown in FIG. 4 (e.g., a mature β2M polypeptide with identity calculated without including or before the addition of the sulfatase motif sequence).

[0162] In an embodiment of the method of preparing a T-Cell-MP-epitope conjugate and/or T-Cell-MP payload conjugate, a sulfatase motif is incorporated into a polypeptide comprising a sequence having at least 85% (e.g., at least 90%, 95%, 98% or 99%, or even 100%) aa sequence identity to at least 150, 175, 200, or 225 contiguous aas of a sequence shown in FIGS. 3A-3I, with sequence identity calculated without including the addition of the sulfatase motif sequence).

[0163] b. Sortase A Enzyme Sites

[0164] Epitopes (e.g., peptides comprising the sequence of an epitope) and payloads may be attached at the N- and/or C-termini T-Cell-MP by incorporating sites for Sortase A conjugation at those locations.

[0165] Sortase A recognizes a C-terminal pentapeptide sequence LP(X5)TG/A (SEQ ID NO:69, with X5 being any single amino acid, and G/A being a glycine or alanine), and creates an amide bond between the threonine within the sequence and glycine or alanine in the N-terminus of the conjugation partner.

[0166] For attachment of epitopes or payloads to the C-terminal portion of a T-Cell-MP polypeptide a LP(X5)TG/A is provided in the carboxy terminal portion of the desired polypeptide(s), such as in an exposed L5 linker (see FIG. 5 structure A). An exposed stretch of glycines or alanines (e.g., (G)₃₋₅ (SEQ ID NOs:70 and 71 when using Sortase A from Staphylococcus aureus or alanines (A)₃₋₅, SEQ ID NOs:72 and 73 when using Sortase A from Streptococcus pyogenes) is provided at the N-terminus of a peptide that comprises an epitope (e.g., in a linker attached to the epitope), a peptide payload (or a linker attached thereto), or a peptide covalently attached to a non-peptide epitope or payload.

[0167] For attachment of epitopes or payloads to the amino terminus of a T-Cell-MP polypeptide, an aa sequence comprising an exposed stretch of glycines (e.g., (G)_{2, 3, 4, or 5}) or alanines (e.g., (A)_{2, 3, 4, or 5}) is provided at the N-terminus, and a LP(X5)TG/A is provided in the carboxy terminal portion of a peptide that comprises an epitope (or a linker attached thereto), a peptide payload (or a linker attached thereto), or a peptide covalently attached to a non-peptide epitope or payload.

[0168] Combining Sortase A with the amino and carboxy modified peptides described above results in a cleavage between the Thr and Gly/Ala residues in the LP(X5)TG/A sequence and formation of a covalently coupled complex of the form: carboxy-modified polypeptide-LP(X5)T*G/A-amino-modified polypeptide, where the “*” represents the bond formed between the threonine of the LP(X5)TG/A motif and the glycine or alanine of the N-terminal modified peptide.

[0169] In place of LP(X5)TG/A, a LPETGG (SEQ ID NO:74) peptide may be used for S. aureus Sortase A coupling, or a LPETAA (SEQ ID NO:75) peptide may be used for S. pyogenes Sortase A coupling. The conjugation reaction still occurs between the threonine and the amino terminal oligoglycine or oligoalanine peptide to yield a carboxy-modified polypeptide-LP(X5)T*G/A-amino-modified polypeptide, where the “*” represents the bond formed between the threonine and the glycine or alanine of the N-terminal modified peptide.

[0170] c. Transglutaminase Enzyme Sites

[0171] Transglutaminases (mTGs) catalyze the formation of a covalent bond between the amide group on the side chain of a glutamine residue and a primary amine donor (e.g., a primary alkyl amine, such as is found on the side chain of a lysine residue in a polypeptide). Transglutaminases may be employed to conjugate epitopes and payloads to T-Cell-MPs, either directly through a free amine, or indirectly via a linker comprising a free amine. As such, glutamine residues added to a T-Cell-MP in the context of a transglutaminase site may be considered as chemical conjugation sites when they can be accessed by enzymes such as Streptoverticillium mobaraense transglutaminase. That enzyme (EC 2.3.2.13) is a stable, calcium-independent enzyme catalyzing the γ-acyl transfer of glutamine to the ε-amino group of lysine. Glutamine residues appearing in a sequence are, however, not always accessible for enzymatic modification. The limited accessibility can be advantageous as it limits the number of locations where modification may occur. For example, bacterial mTGs are generally unable to modify glutamine residues in native IgG1s; however, Schibli and co-workers (Jeger, S., et al. Angew Chem (Int Engl). 2010; 49:99957 and Dennler P, et al. Bioconjug Chem. 2014; 25(3):569-78) found that deglycosylating IgG1 s at N297 rendered glutamine residue Q295 accessible and permitted enzymatic ligation to create an antibody drug conjugate. Further, by producing a N297 to Q297 IgG1 mutant, they introduced two sites for enzymatic labeling by transglutaminase. Modification at N297 also offers the potential to reduce the interaction of the IgG Fc reaction with complement C1q protein.

[0172] Where a T-Cell-MP does not contain a glutamine that may be employed as a chemical conjugation site (e.g., it is not accessible to a transglutaminase or not placed in the desired location), a glutamine residue may be added to a sequence to form a transglutaminase site, or a sequence comprising a transglutaminase accessible glutamine (sometimes referred to as a “glutamine tag” or a “Q-tag”), may be incorporated through protein engineering into the polypeptide. The added glutamine or Q-tag may act as a chemical conjugation site for epitopes or payloads. US Pat. Pub. No. 2017/0043033 A1 describes the incorporation of glutamine residues and Q-tags and the use of transglutaminase for modifying polypeptides and is incorporated herein for those teachings.

[0173] Incorporation of glutamine residues and Q-tags may be accomplished chemically where the peptide is synthesized, or by modifying a nucleic acid that encodes the polypeptide and expressing the modified nucleic acid in a cell or cell-free system. In embodiments, the glutamine-containing Q-tag comprises an aa sequence selected from the group consisting of LQG, LLQGG (SEQ ID NO:76), LLQG (SEQ ID NO:77), LSLSQG (SEQ ID NO:78), and LLQLQG (SEQ ID NO:79) (numerous others are available).

[0174] Glutamine residues and Q-tags may be incorporated into any desired location of a T-Cell-MP. In an embodiment, a glutamine residue or Q-tag may be added in (e.g., at or near the terminus of) any T-Cell-MP element, including the MHC-H or β2M polypeptide sequences or any linker sequence joining them (the L3 linker). Glutamine residues and Q-tags may also be added to the scaffold polypeptide (e.g., the Ig Fc) or any of the linkers present in the T-Cell-MP (e.g., L1 to L6).

[0175] A glutamine residue or Q-tag may be incorporated into, or attached to (e.g., via a peptide linker), a β2M polypeptide in a T-Cell-MP with a sequence having at least 85% (e.g., at least 90%, 95%, 98% or 99%, or even 100%) aa sequence identity to at least 50 (e.g., at least 60, 70, 80, 90, 96, 97, or 98 or all) contiguous aas of a mature β2M polypeptide sequence shown in FIG. 4 (e.g., the sequences shown in FIG. 4 starting at aa 21 and ending at their C-terminus). The mature human β2M polypeptide sequence in FIG. 4 may be selected for incorporation of the glutamine residue or Q-tag. Sequence identity to the β2M polypeptides is determined relative to the corresponding portion of a β2M polypeptide in FIG. 4 without consideration of the added glutamine residue, Q-tag, or any linker or other sequences present.

[0176] In an embodiment, a glutamine residue or Q-tag may be incorporated into a β2M polypeptide sequence having 1 to 15 (e.g., 1, 2, 3, 4, 5, 6, 7, 8, 9, 10, 11, 12, 13, 14, or 15) aa deletions, insertions and/or changes compared with a sequence shown in FIG. 4 (either an entire sequence shown in FIG. 4, or the sequence of a mature polypeptide starting at aa 21 and ending at its C-terminus). Changes are assessed without consideration of the aas of the glutamine residue, Q-tag and any linker sequences present. In one such embodiment a glutamine residue or Q-tag may be placed and/or be inserted within aas 1-15, 15-35, 35-55, 40-50, or 50-70 of a mature β2M sequence, such as those shown in FIG. 4. In one embodiment, a glutamine residue or Q-tag may be located between aas 35-55 (e.g., 40 to 50) of the human mature β2M polypeptide sequence of FIG. 4 and may have 0 to 15 aa substitutions.

[0177] A glutamine residue or Q-tag may be incorporated into, or attached to (e.g., via a peptide linker), a MHC Class I heavy chain polypeptide sequence having at least 85% (e.g., at least 90%, 95%, 98% or 99%, or even 100%) aa sequence identity to at least 150, 175, 200, or 225 contiguous aas of a MHC-H sequence shown in FIGS. 3A to 3I before the addition of the glutamine residue or Q-tag.

[0178] In an embodiment, the added glutamine residue or Q-tag is attached to the N- or C-terminus of a T-Cell-MP or, if present, attached to or within a linker located at the N- or C-terminus of the T-Cell-MP.

[0179] Payloads and epitopes that contain, or have been modified to contain, a primary amine group may be used as the amine donor in a transglutaminase-catalyzed reaction forming a covalent bond between a glutamine residue (e.g., a glutamine residue in a Q-tag) and the epitope or payload.

[0180] Where an epitope or payload does not comprise a suitable primary amine to permit it to act as the amine donor, the epitope or payload may be chemically modified to incorporate an amine group (e.g., modified to incorporate a primary amine by linkage to a lysine, aminocaproic acid, cadaverine etc.). Where an epitope or payload comprises a peptide and requires a primary amine to act as the amine donor, a lysine or another primary amine that a transglutaminase can act on may be incorporated into the peptide. Other amine containing compounds that may provide a primary amine group and that may be incorporated into, or at the end of, an alpha amino acid chain include, but are not limited to, homolysine, 2,7-diaminoheptanoic acid, and aminoheptanoic acid. Alternatively, the epitope or payload may be attached to a peptide or non-peptide linker that comprises a suitable amine group. Examples of suitable non-peptide linkers include an alkyl linker and a PEG (polyethylene glycol) linker.

[0181] Transglutaminase can be obtained from a variety of sources, including enzymes from: mammalian liver (e.g., guinea pig liver); fungi (e.g., Oomycetes, Actinomycetes, Saccharomyces, Candida, Cryptococcus, Monascus, or Rhizopus transglutaminases); myxomycetes (e.g., Physarum polycephalum transglutaminase); and/or bacteria including a variety of Streptoverticillium, Streptomyces, Actinomadura sp., Bacillus, and the like.

[0182] Q-tags may be created by inserting a glutamine or by modifying the aa sequence around a glutamine residue appearing in a Ig Fc, β2M, and/or MHC-H chain sequence appearing in a T-Cell-MP and used as a chemical conjugation site for addition of an epitope or payload. Similarly, Q-tags may be incorporated into the Ig Fc region as chemical conjugation sites that may be used for the conjugation of, for example, epitopes and/or payloads either directly or indirectly through a peptide or chemical linker bearing a primary amine d. Selenocysteine and Non-Natural Amino Acids as Chemical Conjugation Sites

[0183] One strategy for providing site-specific chemical conjugation sites into a T-Cell-MP polypeptide employs the insertion of aas with reactivity distinct from the naturally occurring proteinogenic L-amino acids present in the polypeptide. Such aas include, but are not limited to, selenocysteine (Sec), and the non-natural aas: acetylphenylalanine (p-acetyl-L-phenylalanine, pAcPhe); parazido phenylalanine; and propynyl-tyrosine. Thanos et al. in US Pat. Publication No. 20140051836 A1 discuss some other non-natural aas including O-methyl-L-tyrosine, O-4-allyl-L-tyrosine, tri-O-acetyl-GlcNAcβ-serine, isopropyl-L-phenylalanine, p-benzoyl-L-phenylalanine, L-phosphoserine, and p-propargyloxy-phenylalanine. Other non-natural aas include reactive groups such as, for example, amino, carboxy, acetyl, hydrazino, hydrazido, semicarbazido, sulfanyl, azido and alkynyl. See, e.g., US Pat. Publication No. 20140046030 A1.

[0184] In addition to directly synthesizing polypeptides in the laboratory, two methods utilizing stop codons have been developed to incorporate non-natural aas into proteins and polypeptides utilizing transcription-translation systems. The first incorporates selenocysteine (Sec) by pairing the opal stop codon, UGA, with a Sec insertion sequence. The second incorporates non-natural aas into a polypeptide generally through the use of amber, ochre, or opal stop codons. The use of other types of codons such as a unique codon, a rare codon, an unnatural codon, a five-base codon, and a four-base codon, and the use of nonsense and frameshift suppression have also been reported. See, e.g., US Pat. Publication No. 20140046030 A1 and Rodriguez et al., PNAS 103(23)8650-8655(2006). By way of example, the non-natural amino acid acetylphenylalanine may be incorporated at an amber codon using a tRNA/aminoacyl tRNA synthetase pair in an in vivo or cell-free transcription-translation system.

[0185] Incorporation of both selenocysteine and non-natural aas requires engineering the necessary stop codon(s) into the nucleic acid coding sequence of the T-Cell MP polypeptide at the desired location(s), after which the coding sequence is used to express the T-Cell-MP in an in vivo or cell-free transcription-translation system.

[0186] In vivo systems generally rely on engineered cell-lines to incorporate non-natural aas that act as bio-orthogonal chemical conjugation sites into polypeptides and proteins. See, e.g., International Published Application No. 2002/085923 entitled “In vivo incorporation of unnatural amino acids.” In vivo non-natural aa incorporation relies on a tRNA and an aminoacyl tRNA synthetase pair that is orthogonal to all the endogenous tRNAs and synthetases in the host cell. The non-natural aa of choice is supplemented to the media during cell culture or fermentation, making cell-permeability and stability important considerations.

[0187] Various cell-free synthesis systems provided with the charged tRNA may also be utilized to incorporate non-natural aas. Such systems include those described in US Pat. Publication No. 20160115487A1; Gubens et al., RNA. 2010 August; 16(8): 1660-1672; Kim, D. M. and Swartz, J. R. Biotechnol. Bioeng. 66:180-8 (1999); Kim, D. M. and Swartz, J. R. Biotechnol. Prog. 16:385-90 (2000); Kim, D. M. and Swartz, J. R. Biotechnol. Bioeng. 74:309-16 (2001); Swartz et al, Methods Mol. Biol. 267:169-82 (2004); Kim, D. M. and Swartz, J. R. Biotechnol. Bioeng. 85:122-29 (2004); Jewett, M. C. and Swartz, J. R., Biotechnol. Bioeng. 86:19-26 (2004); Yin, G. and Swartz, J. R., Biotechnol. Bioeng. 86:188-95 (2004); Jewett, M. C. and Swartz, J. R., Biotechnol. Bioeng. 87:465-72 (2004); Voloshin, A. M. and Swartz, J. R., Biotechnol. Bioeng. 91:516-21 (2005).

[0188] Once incorporated into the T-Cell-MP, epitopes and/or payload bearing groups reactive with the incorporated selenocysteine or non-natural aa are brought into contact with the T-Cell-MP under suitable conditions to form a covalent bond. By way of example, the keto group of the pAcPhe is reactive towards alkoxyamines, and via oxime coupling can be conjugated directly to alkoxyamine containing epitopes and/or payloads or indirectly to epitopes and payloads via an alkoxyamine containing linker. Selenocysteine reacts with, for example, primary alkyl iodides (e.g., iodoacetamide which can be used as a linker), maleimides, and methylsulfone phenyloxadiazole groups. Accordingly, epitopes and/or payloads bearing those groups or bound to linkers bearing those groups can be covalently bound to polypeptide chains bearing selenocysteines.

[0189] As discussed above for other chemical conjugation sites, selenocysteines and/or non-natural aas may be incorporated into any desired location in the T-Cell-MP. In an embodiment, selenocysteines and/or non-natural aas may be added in (e.g., at or near the terminus of) any T-Cell-MP element, including the MHC-H or β2M polypeptide sequences or any linker sequence joining them (the L3 linker). Selenocysteines and/or non-natural aas may also be added to the scaffold polypeptide (e.g., the Ig Fc) or any of the linkers present in the T-Cell-MP (e.g., L1 to L6).

[0190] Selenocysteines and non-natural aas may be incorporated into, or attached to (e.g., via a peptide linker), a β2M polypeptide in a T-Cell-MP with a sequence having at least 85% (e.g., at least 90%, 95%, 98% or 99%, or even 100%) aa sequence identity to at least 50 (e.g., at least 60, 70, 80, 90, 96, 97, or 98 or all) contiguous aas of a mature β2M polypeptide sequence shown in FIG. 4 (e.g., the sequences shown in FIG. 4 starting at aa 21 and ending at their C-terminus). The mature human β2M polypeptide sequence in FIG. 4, may be selected for incorporation of the selenocysteines and non-natural aas. Sequence identity to the β2M polypeptides is determined relative to the corresponding portion of a β2M polypeptide in FIG. 4 without consideration of the added selenocysteines, non-natural aas, or any linker or other sequences present.

[0191] In an embodiment, a selenocysteine(s) or non-natural aa(s) may be incorporated into a β2M polypeptide sequence having 1 to 15 (e.g., 1, 2, 3, 4, 5, 6, 7, 8, 9, 10, 11, 12, 13, 14, or 15) aa deletions, insertions and/or changes compared with a sequence shown in FIG. 4 (either an entire sequence shown in FIG. 4, or the sequence of a mature polypeptide starting at aa 21 and ending at its C-terminus). Changes are assessed without consideration of the selenocysteine(s), non-natural aa(s), and any linker sequences present. In one such embodiment, a selenocysteines or non-natural aa may be placed and/or be inserted within aas 1-15, 15-35, 35-55, 40-50, or 50-70 of a mature β2M sequence, such as those shown in FIG. 4. In one embodiment, selenocysteines or non-natural aas may be located between aas 35-55 (e.g., 40 to 50) of the human mature β2M polypeptide sequence of FIG. 4 and may have 0 to 15 aa substitutions.

[0192] A selenocysteine or non-natural aa may be incorporated into, or attached to (e.g., via a peptide linker), a MHC Class I heavy chain polypeptide sequence having at least 85% (e.g., at least 90%, 95%, 98% or 99%, or even 100%) aa sequence identity to at least 150, 175, 200, or 225 contiguous aas of a MHC-H sequence shown in FIGS. 3A to 3I before the addition of the selenocysteines or non-natural aas.

[0193] In an embodiment, the added selenocysteine(s) or non-natural aa(s) is attached to the N- or C-terminus of a T-Cell-MP or, if present, attached to or within a linker located at the N- or C-terminus of the T-Cell-MP. In one such embodiment they may be utilized as sites for the conjugation of, for example, epitopes, targeting sequences, and/or payloads conjugated to the T-Cell-MP either directly or indirectly through a peptide or chemical linker.

[0194] e. Amino Acid Chemical Conjugation Sites

[0195] Any of the variety of functionalities (e.g., —SH, —NH₃, —OH, —COOH and the like) present in the side chains of naturally occurring amino acids, or at the termini of polypeptides, can be used as chemical conjugation sites. This includes the side chains of lysine and cysteine, which are readily modifiable by reagents including N-hydroxysuccinimide and maleimide functionalities, respectively. The main disadvantages of utilizing such amino acid residues is the potential variability and heterogeneity of the products. For example, an IgG has over 80 lysines, with over 20 at solvent-accessible sites. See, e.g., McComb and Owen, AAPS J. 117(2): 339-351. Cysteines tend to be less widely distributed; they tend to be engaged in disulfide bonds, and may be inaccessible (e.g., not accessible by solvent or to molecules used to modify the cysteines), and not located where it is desirable to place a chemical conjugation site. It is, however, possible to selectively modify T-Cell-MP polypeptides to provide naturally occurring and, as discussed above, non-naturally occurring amino acids at the desired locations for placement of a chemical conjugation site. Modification may take the form of direct chemical synthesis of the polypeptides (e.g., by coupling appropriately blocked amino acids) and/or by modifying the sequence of a nucleic acid encoding the polypeptide following expression in a cell or cell-free system. Accordingly, this disclosure includes and provides for the preparation of the T-Cell-MP polypeptides by transcription/translation systems capable of incorporating a non-natural aa or natural aa (including selenocysteine) to be used as a chemical conjugation site for epitope or payload conjugation.

[0196] This disclosure includes and provides for the preparation of a portion of a T-Cell-MP by transcription/translation systems and joining to its C- or N-terminus a polypeptide bearing a non-natural aa or natural aa (including selenocysteine) prepared by, for example, chemical synthesis. The polypeptide, which may include a linker, may be joined by any suitable method including the use of a sortase as described above for peptide epitopes. In an embodiment, the polypeptide may comprise a sequence of 2, 3, 4, or 5 alanines or glycines that may serve for sortase conjugation and/or as part of a linker sequence.

[0197] A naturally occurring aa (e.g., a cysteine) to be used as a chemical conjugation site may be provided at any desired location of a T-Cell-MP. In an embodiment, the naturally occurring aa may be provided in (e.g., at or near the terminus of) any T-Cell-MP element, including the MHC-H or β2M polypeptide sequences or any linker sequence joining them (the L3 linker). Naturally occurring aa(s) may also be provided in the scaffold polypeptide (e.g., the Ig Fc) or any of the linkers present in the T-Cell-MP (e.g., L1 to L6).

[0198] A naturally occurring aa (e.g., a cysteine) may also be provided in (e.g., via protein engineering), or attached to (e.g., via a peptide linker), a β2M polypeptide in a T-Cell-MP with a sequence having at least 85% (e.g., at least 90%, 95%, 98% or 99%, or even 100%) aa sequence identity to at least 50 (e.g., at least 60, 70, 80, 90, 96, 97, or 98 or all) contiguous aas of a mature β2M polypeptide sequence shown in FIG. 4 (e.g., the sequences shown in FIG. 4 starting at aa 21 and ending at their C-terminus). The mature human β2M polypeptide sequence in FIG. 4 may be selected for incorporation of the naturally occurring aa. Sequence identity to the β2M polypeptides is determined relative to the corresponding portion of a β2M polypeptide in FIG. 4 without consideration of the added naturally occurring aa, any linker, or any other sequences present.

[0199] In an embodiment, a naturally occurring aa (e.g., a cysteine) may be provided, e.g., via protein engineering in a β2M polypeptide sequence having 1 to 15 (e.g., 1, 2, 3, 4, 5, 6, 7, 8, 9, 10, 11, 12, 13, 14, or 15) aa deletions, insertions and/or changes compared with a sequence shown in FIG. 4 (either an entire sequence shown in FIG. 4, or the sequence of a mature polypeptide starting at aa 21 and ending at its C-terminus). Changes are assessed without consideration of the aas of the naturally occurring aa, any linker, or other sequences present. In one such embodiment a naturally occurring aa (e.g., a cysteine) may be engineered (e.g., using the techniques of molecular biology) within aas 1-15, 15-35, 35-55, 40-50, or 50-70 of a mature β2M sequence, such as those shown in FIG. 4. In one embodiment, a naturally occurring aa (e.g., a cysteine) may be provided between aas 35-55 (e.g., between 40 and 50, between 42 and 48, between 43 and 45, or at aa 44) of the human mature β2M polypeptide sequence of FIG. 4 and may have 0 to 15 aa substitutions.

[0200] A naturally occurring aa (e.g., a cysteine) may be provided in, or attached to (e.g., via a peptide linker), a MHC Class I heavy chain polypeptide sequence having at least 85% (e.g., at least 90%, 95%, 98% or 99%, or even 100%) aa sequence identity to at least 150, 175, 200, or 225 contiguous aas of a MHC-H sequence shown in FIGS. 3A to 3I before the addition of the naturally occurring aa.

[0201] In an embodiment, the naturally occurring aa (e.g., a cysteine) may be attached to the N- or C-terminus of a T-Cell-MP, or attached to or within a linker, if present, located at the N- or C-terminus of the T-Cell-MP.

[0202] In one embodiment, a T-Cell-MP contains at least one naturally occurring aa (e.g., a cysteine) to be used as a chemical conjugation site provided, e.g., via protein engineering, in a β2M sequence as shown in FIG. 4, an Ig Fc sequence as shown in any of FIGS. 2A-G, or a MHC Class I heavy chain polypeptide as shown in FIGS. 3A-3I. In an embodiment, at least one naturally occurring aa to be used as a chemical conjugation site is provided in a polypeptide having at least 85% (e.g., at least 90%, 95%, 98% or 99%, or even 100%) aa sequence identity to at least 50 (e.g., at least 60, 70, 80, 90, 96, 97, or 98 or all) contiguous aas of a mature β2M sequence as shown in FIG. 4, an Ig Fc sequence as shown in FIG. 2, or at least 85% (e.g., at least 90%, 95%, 98% or 99%, or even 100%) aa sequence identity to at least 150, 175, 200, or 225 contiguous aas of a MHC Class I heavy chain polypeptide as shown in any of FIGS. 3A-3I. At least one naturally occurring aa (e.g., a cysteine) may be provided as a chemical conjugation site in a T-Cell-MP β2M aa sequence having at least 90% (e.g., at least 93%, 95%, 98% or 99%, or even 100%) aa sequence identity with at least the amino terminal 10, 20, 30, 40, 50, 60 or 70 aas of a mature β2M sequence as shown in FIG. 4. At least one naturally occurring aa (e.g., a cysteine) may be provided as a chemical conjugation site in a T-Cell-MP Ig Fc sequence (e.g., as shown in any of FIGS. 2A-2G). At least one naturally occurring aa (e.g., a cysteine) may be provided as a chemical conjugation site in a T-Cell-MP MHC Class I heavy chain polypeptide sequence having at least 85% (e.g., at least 90%, 95%, 98% or 99%, or even 100%) aa sequence identity to at least 150, 175, 200, or 225 contiguous aas of a MHC H polypeptide sequence provided in any of FIGS. 3A to 3I. In another embodiment, at least one naturally occurring aa to be used as a chemical conjugation site is provided in a T-Cell-MP polypeptide comprising at least 30, 40, 50, 60, 70, 80, 90, or 100 contiguous aas having 100% aa sequence identity to a MHC Class I heavy chain sequence as shown in any of FIGS. 3A to 3I or a mature β2M sequence as shown in FIG. 4.

[0203] In any of the embodiments mentioned above where a naturally occurring aa is provided, e.g., via protein engineering, in a polypeptide, the aa may be selected from the group consisting of arginine, lysine, cysteine, serine, threonine, glutamic acid, glutamine, aspartic acid, and asparagine. Alternatively, the aa provided as a conjugation site is selected from the group consisting of lysine, cysteine, serine, threonine, and glutamine. The aa provided as a conjugation site may also be selected from the group consisting of lysine, glutamine, and cysteine. In one instance, the provided aa is cysteine. In another instance, the provided aa is lysine. In still another instance, the provided aa is glutamine.

[0204] Any method known in the art may be used to couple payloads or epitopes to amino acids provided in an unconjugated T-Cell-MP. By way of example, maleimides may be utilized to couple to sulfhydryls, N-hydroxysuccinimide may be utilized to couple to amine groups, acid anhydrides or chlorides may be used to couple to alcohols or amines, and dehydrating agents may be used to couple alcohols or amines to carboxylic acid groups. Accordingly, using such chemistry an epitope or payload may be coupled directly, or indirectly through a linker (e.g., a homo- or hetero-bifunctional crosslinker), to a location on an unconjugated T-Cell-MP polypeptide. A number of bifunctional crosslinkers may be utilized, including, but not limited to, those described for linking a payload to a T-Cell-MP described herein below. For example, a peptide epitope (or a peptide-containing payload) including a maleimide group attached by way of a homo- or hetero-bifunctional linker (see, e.g., FIG. 9) or a maleimide amino acid can be conjugated to a sulfhydryl of a chemical conjugation site (e.g., a cysteine residue) that is naturally occurring or provided in a T-Cell-MP.

[0205] Maleimido amino acids can be incorporated directly into peptides (e.g., peptide epitopes) using a Diels-Alder/retro-Diels-Alder protecting scheme as part of a solid phase peptide synthesis. See, e.g., Koehler, Kenneth Christopher (2012), “Development and Implementation of Clickable Amino Acids,” Chemical & Biological Engineering Graduate Theses & Dissertations, 31, https://scholar.colorado.edu/chbe_gradetds/31.

[0206] A maleimide group may also be appended to an epitope (e.g., a peptide epitope) using a homo- or hetero-bifunctional linker (sometimes referred to as a crosslinker) that attaches a maleimide directly (or indirectly, e.g., through an intervening linker that may comprise additional aas bound to the epitope) to the epitope (e.g., peptide epitope). For example, a heterobifunctional N-hydroxysuccinimide-maleimide crosslinker can attach maleimide to an amine group of a peptide lysine. Some specific crosslinkers include molecules with a maleimide functionality and either a N-hydroxysuccinimide ester (NHS) or N-succinimidyl group that can attach a maleimide to an amine (e.g., an epsilon amino group of lysine). Examples of such crosslinkers include, but are not limited to, NHS-PEG4-maleimide, γ-maleimide butyric acid N-succinimidyl ester (GMBS); ε-maleimidocaproic acid N-hydroxysuccinimide ester (EMCS); m-maleimide benzoyl-N-hydroxysuccinimide ester (MBS); and N-(α-maleimidoacetoxy)-succinimide ester (AMAS), which offer different lengths and properties for peptide immobilization. Other amine reactive crosslinkers that incorporate a maleimide group include N-succinimidyl 4-(2-pyridyldithio) butanoate (SPDB). Additional crosslinkers (bifunctional agents) are recited below. In an embodiment the epitopes coupled to the T-Cell-MP have a maleimido alkyl carboxylic acid coupled to the peptide by an optional linker (see, e.g., FIG. 9), coupled, for example, by an amide formed with the epsilon amino group of a lysine. The maleimido carboxylic acid can be, for example, a maleimido ethanoic, propanoic, butanoic, pentanoic, hexanoic, heptanoic, or octanoic acid.

[0207] A peptide epitope may be coupled to a naturally occurring cysteine present or provided in (e.g., engineered into), for example, the binding pocket of a T-Cell-MP through a bifunctional linker comprising a maleimide or a maleimide amino acid incorporated into the peptide, thereby forming a T-Cell-MP epitope conjugate. A peptide epitope may be conjugated (e.g., by one or two maleimide amino acids or at least one maleimide containing bifunctional linker) to a MHC heavy chain having cysteine residues at any one or more locations within or adjacent to the MHC-H binding pocket. By way of example, a peptide epitope comprising maleimido amino acids or bearing a maleimide group as part of a crosslinker attached to the peptide may be covalently attached at 1 or 2 aas (e.g., cysteines) at MHC-H positions 2, 5, 7, 59, 84, 116, 139, 167, 168, 170, and/or 171 (e.g., Y7C, Y59C, Y116C, A139C, W167C, L168C, R170C, and Y171C substitutions) with the numbering as in FIGS. 3D-3I. A peptide epitope may also be conjugated (e.g., by one or two maleimide amino acids or at least one maleimide containing bifunctional linker) to a MHC heavy chain having cysteine residues at any one or more (e.g., 1 or 2) aa positions selected from positions 7 and/or 116, (e.g., Y7C and Y116C substitutions) with the numbering as in FIGS. 3D-3H. Cysteine substitution at positions 116 (e.g., Y116C) and/or 167 (e.g., W167C), with the numbering as in FIGS. 3D-3H, may be used separately or in combination to anchor epitopes (e.g., peptide epitopes) with one or two bonds formed through maleimide groups (e.g., at one or both of the ends of the epitope containing peptide).

[0208] Peptide epitopes may also be coupled to a naturally occurring cysteine present or provided in (e.g., engineered into) a β2M polypeptide sequence having at least 85% (e.g., at least 90%, 95% 97% or 100%) sequence identity to at least 60 contiguous amino acids (e.g., at least 70, 80, 90 or all contiguous aas) of a mature β2M polypeptide sequence set forth in FIG. 4. Some solvent accessible positions of mature β2M polypeptides that may be substituted by a cysteine to create a chemical conjugation site include: 2, 14, 16, 34, 36, 44, 45, 47, 48, 50, 58, 74, 77, 85, 88, 89, 91, 94, and 98 (Gln 2, Pro 14, Glu 16, Asp 34, Glu 36, Glu 44, Arg 45, Glu 47, Arg 48, Glu 50, Lys 58, Glu 74, Glu 77, Val 85, Ser 88, Gln 89, Lys 91, Lys 94, and Asp 98) of the mature peptide from NP_004039.1, or their corresponding amino acids in other β2M sequences (see the sequence alignment in FIG. 4). For example, epitopes may be conjugated to cysteines at positions 2, 44, 50, 77, 85, 88, 91, or 98 of the mature β2M polypeptides (aas 22, 64, 70, 97, 105, 108, 111, or 118 of the mature β2M sequences as shown in FIG. 4). Accordingly, the β2M sequences of a T-Cell-MP may contain cysteine chemical conjugation sites provided (e.g., by protein engineering) in the mature β2M sequence selected from Q2C, E44C, E50C, E77C, V85V, S88C, K91C, and D98C. The cysteine chemical conjugation sites in β2M sequences may also be combined with MHC-H Y84C and A139C substitutions made to stabilize the MHC H by forming an intrachain disulfide bond between MHC-H sequences. In one instance, the cysteine chemical conjugation site provided in the mature β2M is located at E44 (an E44C substitution). In another instance, the cysteine chemical conjugation site provided in the mature β2M is located at E44 (an E44C substitution) and the β2M sequence also comprises MHC-H Y84C and A139C substitutions that form an intrachain disulfide bond.

[0209] Where conjugation of an epitope, targeting sequences and/or payload is to be conducted through a cysteine chemical conjugation site present in an unconjugated T-cell-MP (e.g., using a maleimide modified epitope or payload) a variety of process conditions may affect the conjugation efficiency and the quality (e.g., the amount/fraction of unaggregated duplex T-Cell-MP epitope conjugate resulting from the reaction) of conjugated T-Cell-MP resulting from the conjugation reaction. Conjugation process conditions that may be individually optimized include but are not limited to (i) prior to conjugation unblocking of cysteine sulfhydryls (e.g., potential blocking groups may be present and removed), (ii) the ratio of the T-Cell-MP to the epitope or payload, (iii) the reaction pH, (iv) the buffer employed, (v) additives present in the reaction, (vi) the reaction temperature, and (vii) the reaction time.

[0210] Prior to conjugation T-Cell-MPs may be treated with a disulfide reducing agent such as dithiothreitol (DTT), mercaptoethanol, or tris(2-carboxyethyl)phosphine (TCEP) to reduce and free cysteine sulfhydryls that may be blocked. Treatment may be conducted using relatively low amounts of reducing agent, for example from about 0.5 to 2.0 reducing equivalents per cysteine conjugation site for relatively short periods, and the cysteine chemical conjugation site of the unconjugated T-Cell MP may be available as a reactive nucleophile for conjugation from about 10 minutes to about 1 hour, or from about 1 hour to 5 hours.

[0211] The ratio of the unconjugated T-Cell-MP to the epitope or payload being conjugated may be varied from about 1:2 to about 1:100, such as from about 1:2 to about 1:3, from about 1:3 to about 1:10, from about 1:10 to about 1:20, from about 1:20 to about 1:40, or from about 1:40 to about 1:100. The use of sequential additions of the reactive epitope or payload may be made to drive the coupling reaction to completion (e.g., multiple does of maleimide or N-hydroxy succinimide modified epitopes may be added to react with the T-Cell-MP).

[0212] As previously indicated, the conjugation reaction may be affected by the buffer, its pH, and additives that may be present. For maleimide coupling to reactive cysteines present in a T-Cell-MP the reactions are typically carried out from about pH 6.5 to about pH 8.5 (e.g., from about pH 6.5 to about pH 7.0, from about pH 7.0 to about pH 7.5, from about pH 7.5 to about pH 8.0, or from about pH 8.0 to about pH 8.5). Any suitable buffer not containing active nucleophiles (e.g., reactive thiols) and preferably degassed to avoid reoxidation of the sulfhydryl may be employed for the reaction. Some suitable traditional buffers include phosphate buffered saline (PBS), Tris-HCl, and (4-(2-hydroxyethyl)-1-piperazineethanesulfonic acid) HEPES. As an alternative to traditional buffers, maleimide conjugation reactions may be conducted in buffers/reaction mixtures comprising amino acids such as arginine, glycine, lysine, or histidine. The use of high concentrations of amino acids, e.g., from about 0.1 M (molar) to about 1.5 M (e.g., from about 0.1 to about 0.25, from about 0.25 to about 0.5 from about 0.3 to about 0.6, from about 0.4 to about 0.7, from about 0.5 to about 0.75, from about 0.75 to about 1.0, from about 1.0 to about 1.25 M, or from about 1.25 to about 1.5 M) may stabilize the conjugated and/or unconjugated T-Cell-MP.

[0213] Additives useful for maleimide and other conjugation reactions include, but are not limited to: protease inhibitors; metal chelators (e.g., EDTA) that can block unwanted side reactions and inhibit metal dependent proteases if they are present; detergents (e.g., polysorbate 80 sold as TWEEN 80®, or nonylphenoxypolyethoxyethanol sold under the names NP40 and Tergitol™ NP); and polyols such a sucrose or glycerol that can add to protein stability.

[0214] Conjugation of T-Cell-MPs with epitopes, targeting sequences and/or payloads, and particularly conjugation at cysteines using maleimide chemistry, can be conducted over a range of temperatures, such as 0° to 40° C. For example, conjugation reactions, including cysteine-maleimide reactions, can be conducted from about 0° to about 10° C., from about 10° to about 20° C., from about 20° to about 30° C., from about 25° to about 37° C., or from about 30° to about 40° C. (e.g., at about 20° C., at about 30° C. or at about 37° C.).

[0215] Where a pair of sulfhydryl groups are present, they may be employed simultaneously for chemical conjugation to a T-Cell-MP. In such an embodiment, an unconjugated T-Cell-MP that has a disulfide bond, or that has two cysteines (or selenocysteines) provided at locations proximate to each other, may be utilized as a chemical conjugation site by incorporation of bis-thiol linkers. Bis-thiol linkers, described by Godwin and co-workers, avoid the instability associated with reducing a disulfide bond by forming a bridging group in its place and at the same time permit the incorporation of another molecule, which can be an epitope or payload. See, e.g., Badescu G, et al., (2014), Bioconjug Chem., 25(6):1124-36, entitled Bridging disulfides for stable and defined antibody drug conjugates, describing the use of bis-sulfone reagents, which incorporate a hydrophilic linker (e.g., PEG (polyethylene glycol) linker).

[0216] Generally, stoichiometric or near stoichiometric amounts of dithiol reducing agents (e.g., dithiothreitol) are employed to reduce the disulfide bond and allow the bis-thiol linker to react with both cysteine and/or selenocysteine residues. Where multiple disulfide bonds are present, the use of stoichiometric or near stoichiometric amounts of reducing agents may allow for selective modification at one site. See, e.g., Brocchini, et al., Adv. Drug. Delivery Rev. (2008) 60:3-12. Where a T-Cell-MP or duplexed T-Cell-MP does not comprise a pair of cysteines and/or selenocysteines (e.g., a selenocysteine and a cysteine), they may be provided in the polypeptide (by introducing one or both of the cysteines or selenocysteines) to provide a pair of residues that can interact with a bis-thiol linker. The cysteines and/or selenocysteines should be located such that a bis-thiol linker can bridge them (e.g., at a location where two cysteines could form a disulfide bond). Any combination of cysteines and selenocysteines may be employed (i.e. two cysteines, two selenocysteines, or a selenocysteine and a cysteine). The cysteines and/or selenocysteines may both be present on a T-Cell-MP. Alternatively, in a duplex T-Cell-MP the first cysteine and/or selenocysteine is present in the first T-Cell-MP of the duplex and a second cysteine and/or selenocysteine is present in the second T-Cell-MP of the duplex, with the bis-thiol linker acting as a covalent bridge between the duplexed T-Cell-MPs.

[0217] In an embodiment, a pair of cysteine and/or selenocysteine residues is incorporated into a β2M sequence of a T-Cell-MP having at least 85% (e.g., at least 90%, 95%, 98% or 99%, or even 100%) aa sequence identity to at least 50 (e.g., at least 60, 70, 80, 90, 96, 97, or 98 or all) contiguous aas of a mature β2M polypeptide sequence shown in FIG. 4 before the addition of the pair of cysteines and/or selenocysteines, and/or into an L2 or L3 peptide linker attached to one of those sequences. In one such embodiment the pair of cysteines and/or selenocysteines may be utilized as a bis-thiol linker coupling site for the conjugation of an epitope and/or payload through a peptide or chemical linker attached to the bis-thiol group.

[0218] In another embodiment, a pair of cysteines and/or selenocysteines is incorporated into a MHC-H polypeptide sequence of a T-Cell-MP as a chemical conjugation site. In an embodiment, a pair of cysteines and/or selenocysteines is incorporated into a polypeptide comprising a sequence having at least 85% (e.g., at least 90%, 95%, 98% or 99%, or even 100%) aa sequence identity to a sequence having at least 150, 175, 200, or 225 contiguous aas of a MHC-H sequence shown in any of FIGS. 3A-3I before the addition of a pair of cysteines or selenocysteines, or into a peptide linker attached to one of those sequences. In one such embodiment the pair of cysteines and/or selenocysteines may be utilized as a bis-thiol linker coupling site for the conjugation of an epitope and/or payload through a peptide or chemical linker attached to the bis-thiol linker. Where the MHC-H sequence includes a Y84C and A139C substitutions the bis-thiol linker may be used to form a covalent bridge between those sites for the covalent coupling of an epitope (e.g., a peptide epitope).

[0219] In another embodiment, a pair of cysteines and/or selenocysteines is incorporated into an Ig Fc sequence of a T-Cell-MP to provide a chemical conjugation site. In an embodiment a pair of cysteines and/or selenocysteines is incorporated into a polypeptide comprising an Ig Fc sequence having at least 85% (e.g., at least 90%, 95%, 98% or 99%, or even 100%) aa sequence identity to a sequence shown in any of the Fc sequences of FIGS. 2A-2G before the addition of the pair of cysteines or selenocysteines. In one such embodiment the pair of cysteines and/or selenocysteines is utilized as a bis-thiol linker coupling site for the conjugation of an epitope and/or payload through a peptide or chemical linker attached to the bis-thiol group. The bis-thiol linker may be used to form a covalent bridge between scaffold polypeptides of a duplex T-Cell-MP. In such a case the cysteines of the lower hinge region that form interchain disulfide bonds, if present in the Ig Fc scaffold polypeptide sequence, may be used to insert the bis-thiol linker.

[0220] f. Other Chemical Conjugation Sites

[0221] (i) Carbohydrate Chemical Conjugation Sites

[0222] Many proteins prepared by cellular expression contain added carbohydrates (e.g., oligosaccharides of the type added to antibodies expressed in mammalian cells). Accordingly, where a T-Cell-MP is prepared by cellular expression, carbohydrates may be present and available as selective chemical conjugation sites in, for example, glycol-conjugation reactions, particularly where the T-Cell-MP comprises an Ig Fc scaffold. McCombs and Owen, AAPS Journal, (2015) 17(2): 339-351, and references cited therein, describe the use of carbohydrate residues for glycol-conjugation of molecules to antibodies.

[0223] The addition and modification of carbohydrate residues may also be conducted ex vivo, through the use of chemicals that alter the carbohydrates (e.g., periodate, which introduces aldehyde groups), or by the action of enzymes (e.g., fucosyltransferases) that can incorporate chemically reactive carbohydrates or carbohydrate analogs for use as chemical conjugation sites. In an embodiment, the incorporation of an Ig Fc scaffold with known glycosylation sites may be used to introduce site specific chemical conjugation sites.

[0224] This disclosure includes and provides for T-Cell-MPs having carbohydrates as chemical conjugation (e.g., glycol-conjugation) sites.

[0225] The disclosure also includes and provides for the use of such molecules in forming conjugates with epitopes and with other molecules such as targeting sequences, drugs, and diagnostic agent payloads.

[0226] (ii) Nucleotide Binding Sites

[0227] Nucleotide binding sites offer site-specific functionalization through the use of a UV-reactive moiety that can covalently link to the binding site. Bilgicer et al., Bioconjug Chem. (2014) 25(7):1198-202, reported the use of an indole-3-butyric acid (IBA) moiety that can be covalently linked to an IgG at a nucleotide binding site. By incorporation of the sequences required to form a nucleotide binding site, chemical conjugates of T-Cell-MP with suitably modified epitopes and/or other molecules (e.g., payload drugs or diagnostic agents) bearing a reactive nucleotide may be employed to prepare T-Cell-MP-epitope conjugates. The epitope or payload may be coupled to the nucleotide binding site through the reactive entity (e.g., an IBA moiety) either directly or indirectly through an interposed linker.

[0228] This disclosure includes and provides for T-Cell-MPs having nucleotide binding sites as chemical conjugation sites. The disclosure also includes and provides for the use of such molecules in forming conjugates with epitopes and with other molecules such as drugs and diagnostic agents, and the use of those molecules in methods of treatment and diagnosis.

### 3 MHC Polypeptides of T-Cell-MPs

[0229] As noted above, T-Cell-MPs include MHC polypeptides. For the purposes of the instant disclosure, the term “major histocompatibility complex (MHC) polypeptides” is meant to include MHC Class I polypeptides of various species, including human MHC (also referred to as human leukocyte antigen (HLA)) polypeptides, rodent (e.g., mouse, rat, etc.) MHC polypeptides, and MHC polypeptides of other mammalian species (e.g., lagomorphs, non-human primates, canines, felines, ungulates (e.g., equines, bovines, ovines, caprines, etc.), and the like. The term “MHC polypeptide” is meant to include Class I MHC polypeptides (e.g., β-2 microglobulin and MHC Class I heavy chain and/or portions thereof). Both the β2M and MHC-H chain sequences in a T-Cell-MP (may be of human origin. Unless expressly stated otherwise, the T-Cell-MPs and the T-Cell-MP-epitope conjugates described herein are not intended to include membrane anchoring domains (transmembrane regions) of a MHC-H chain, or a part of that molecule sufficient to anchor a T-Cell-MP, or a peptide thereof, to a cell (e.g., eukaryotic cell such as a mammalian cell) in which it is expressed. In addition, the MHC-H chain present in T-Cell-MPs does not include a signal peptide, a transmembrane domain, or an intracellular domain (cytoplasmic tail) associated with a native MHC Class I heavy chain. Thus, e.g., in some cases, the MHC-H chain present in a T-Cell-MP includes only the α1, α2, and α3 domains of a MHC Class I heavy chain. The MHC Class I heavy chain present in a T-Cell-MP may have a length of from about 270 amino acids (aa) to about 290 aa. The MHC Class I heavy chain present in a T-Cell-MP may have a length of 270 aa, 271 aa, 272 aa, 273 aa, 274 aa, 275 aa, 276 aa, 277 aa, 278 aa, 279 aa, 280 aa, 281 aa, 282 aa, 283 aa, 284 aa, 285 aa, 286 aa, 287 aa, 288 aa, 289 aa, or 290 aa.

[0230] In some cases, the MHC-H and/or β2M polypeptide of a T-Cell-MP is a humanized or human MHC polypeptide, where human MHC polypeptides are also referred to as “human leukocyte antigen” (“HLA”) polypeptides, more specifically, a Class I HLA polypeptide, e.g., a β2M polypeptide, or a Class I HLA heavy chain polypeptide. Class I HLA heavy chain polypeptides that can be included in T-Cell-MPs include HLA-A, -B, -C, -E, -F, and/or -G heavy chain polypeptides. The Class I HLA heavy chain polypeptides of T-Cell-MPs may comprise polypeptide sequences having at least 75%, at least 80%, at least 85%, at least 90%, at least 95%, at least 98%, at least 99%, or 100% aa sequence identity to all or part (e.g., 50, 75, 100, 150, 200, 225, 250, or 260 contiguous aas) of the aa sequence of any of the human HLA heavy chain polypeptides depicted in FIGS. 3A to 3I (e.g., the sequences encompassing the α1, α2, and α3 domains). For example, they may comprise 1-30, 1-5, 5-10, 10-15, 15-20, 20-25 or 25-30 aa insertions, deletions, and/or substitutions (in addition to those locations indicated as being variable in the heavy chain consensus sequences of FIGS. 3E to 3I).

[0231] As an example, a MHC Class I heavy chain polypeptide of a multimeric polypeptide can comprise an aa sequence having at least 75%, at least 80%, at least 85%, at least 90%, at least 95%, at least 98%, at least 99%, or 100% aa sequence identity to aas 25-300 (lacking all, or substantially all, of the leader, transmembrane and cytoplasmic sequences) or 25-365 (lacking the leader) of the human HLA-A heavy chain polypeptides depicted in FIGS. 3A, 3B and/or 3C.

[0232] a. MHC Class I Heavy Chains

[0233] Class I human MHC polypeptides may be drawn from the classical HLA alleles (HLA-A, B, and C), or the non-classical HLA alleles (e.g., HLA-E, F and G). The following are non-limiting examples of MHC-H alleles and variants of those alleles that may be incorporated into T-Cell-MPs and their epitope conjugates.

[0234] (i) HLA-A Heavy Chains

[0235] The HLA-A heavy chain peptide sequences, or portions thereof, that may be incorporated into a T-Cell-MP include, but are not limited to, the alleles: A*0101, A*0201, A*0301, A*1101, A*2301, A*2402, A*2407, A*3303, and A*3401, which are aligned without all, or substantially all, of the leader, transmembrane and cytoplasmic sequences in FIG. 3E. Any of those alleles may further comprise a substitution at one or more of positions 84 and/or 139 (as shown in FIG. 3E) selected from: a tyrosine to alanine at position 84 (Y84A); a tyrosine to cysteine at position 84 (Y84C); and an alanine to cysteine at position 139 (A139C). In addition, a HLA-A sequence having at least 75% (e.g., at least 80%, at least 85%, at least 90%, at least 95%, at least 98%, at least 99% or 100%) aa sequence identity to all or part (e.g., 50, 75, 100, 150, 200, 225, 250, or 260 contiguous aas) of the sequence of those HLA-A alleles may also be incorporated into a T-Cell-MP (e.g., it may comprise 1-30, 1-5, 5-10, 10-15, 15-20, 20-25, or 25-30 aa insertions, deletions, and/or substitutions). The HLA-A heavy chain polypeptide sequence of a T-Cell-MP may comprise the Y84C and A139C substitutions.

[0236] (a) HLA-A*0101 (HLA-A*01:01:01:01)

[0237] A MHC Class I heavy chain polypeptide of a T-Cell-MP or a T-Cell-MP-epitope conjugate may comprise aa sequence of HLA-A*01:01:01:01 (HLA-A*0101, or HLA-A*01:01 listed as HLA-A in FIG. 3D (SEQ ID NO:24) and in FIG. 3E), or a sequence having at least 75% (at least 80%, at least 85%, at least 90%, at least 95%, at least 98%, at least 99% or 100%) aa sequence identity to all or part (e.g., 50, 75, 100, 150, 200, 225, 250, or 260 contiguous aas) of that sequence (e.g., it may comprise 1-30, 1-5, 5-10, 10-15, 15-20, 20-25, or 25-30 aa insertions, deletions, and/or substitutions). In an embodiment, where the HLA-A heavy chain polypeptide of a T-Cell-MP has less than 100% identity to the sequence labeled HLA-A in FIG. 3D, it may comprise a substitution at one or more of positions 84 and/or 139 selected from: a tyrosine to alanine at position 84 (Y84A); a tyrosine to cysteine at position 84 (Y84C); and an alanine to cysteine at position 139 (A139C). The HLA-A*0101 heavy chain polypeptide sequence of a T-Cell-MP may comprise the Y84C and A139C substitutions.

[0238] (b) HLA-A*0201 (HLA-A*02:01)

[0239] A MHC Class I heavy chain polypeptide of a T-Cell-MP or a T-Cell-MP-epitope conjugate may comprise an aa sequence of HLA-A*0201 (SEQ ID NO:27) provided in FIG. 3D or FIG. 3E, or a sequence having at least 75% (e.g., at least 80%, at least 85%, at least 90%, at least 95%, at least 98%, at least 99% or 100%) aa sequence identity to all or part (e.g., 50, 75, 100, 150, 200, 225, 250, or 260 contiguous aas) of that sequence (e.g., it may comprise 1-30, 1-5, 5-10, 10-15, 15-20, 20-25, or 25-30 aa insertions, deletions, and/or substitutions). In an embodiment, where the HLA-A*0201 heavy chain polypeptide of a T-Cell-MP has less than 100% identity to the sequence labeled HLA-A*0201 in FIG. 3D or 3E, it may comprise a substitution at one or more of positions 84 and/or 139 selected from: a tyrosine to alanine at position 84 (Y84A); a tyrosine to cysteine at position 84 (Y84C); and an alanine to cysteine at position 139 (A139C). The HLA-A*0201 heavy chain polypeptide sequence of a T-Cell-MP may comprise the Y84C and A139C substitutions.

[0240] (c) HLA-A*1101 (HLA-A*11:01)

[0241] A MHC Class I heavy chain polypeptide of a T-Cell-MP or a T-Cell-MP-epitope conjugate may comprise an aa sequence of HLA-A*1101 (SEQ ID NO:32) provided in FIG. 3D or 3E, or a sequence having at least 75% (e.g., at least 80%, at least 85%, at least 90%, at least 95%, at least 98%, at least 99% or 100%) aa sequence identity to all or part (e.g., 50, 75, 100, 150, 200, 225, 250, or 260 contiguous aas) of that sequence (e.g., it may comprise 1-30, 1-5, 5-10, 10-15, 15-20, 20-25, or 25-30 aa insertions, deletions, and/or substitutions). The HLA-A*1101 heavy chain allele may be prominent in Asian populations, including populations of individuals of Asian descent.

[0242] In an embodiment, where the HLA-A*1101 heavy chain polypeptide of a T-Cell-MP has less than 100% identity to the sequence labeled HLA-A*1101 in FIG. 3D or 3E, it may comprise a substitution at one or more of positions 84 and/or 139 selected from: a tyrosine to alanine at position 84 (Y84A); a tyrosine to cysteine at position 84 (Y84C); and an alanine to cysteine at position 139 (A139C). The HLA-A*1101 heavy chain polypeptide sequence of a T-Cell-MP may comprise the Y84C and A139C substitutions.

[0243] (d) HLA-A*2402 (HLA-A*24:02)

[0244] A MHC Class I heavy chain polypeptide of a T-Cell-MP or a T-Cell-MP-epitope conjugate may comprise an aa sequence of HLA-A*2402 (SEQ ID NO:33) provided in FIG. 3D or 3E, or a sequence having at least 75% (e.g., at least 80%, at least 85%, at least 90%, at least 95%, at least 98%, at least 99% or 100%) aa sequence identity to all or part (e.g., 50, 75, 100, 150, 200, 225, 250, or 260 contiguous aas) of that sequence (e.g., it may comprise 1-30, 1-5, 5-10, 10-15, 15-20, 20-25, or 25-30 aa insertions, deletions, and/or substitutions). The HLA-A*2402 heavy chain allele may be prominent in Asian populations, including populations of individuals of Asian descent.

[0245] In an embodiment, where the HLA-A*2402 heavy chain polypeptide of a T-Cell-MP has less than 100% identity to the sequence labeled HLA-A*2402 in FIG. 3D or 3E, it may comprise a substitution at one or more of positions 84 and/or selected from: a tyrosine to alanine at position 84 (Y84A); a tyrosine to cysteine at position 84 (Y84C); and an alanine to cysteine at position 139 (A139C). The HLA-A*2402 heavy chain polypeptide sequence of a T-Cell-MP may comprise the Y84C and A139C substitutions.

[0246] (e) HLA-A*3303 (HLA-A*33:03) or HLA-A*3401 (HLA-A*34:01)

[0247] A MHC Class I heavy chain polypeptide of a T-Cell-MP or a T-Cell-MP-epitope conjugate may comprise an aa sequence of HLA-A*3303 (SEQ ID NO:34) or HLA-A*3401 (SEQ ID NO:38) provided in FIG. 3D or 3E, or a sequence having at least 75% (e.g., at least 80%, at least 85%, at least 90%, at least 95%, at least 98%, or at least 99%) or 100% aa sequence identity to all or part (e.g., 50, 75, 100, 150, 200, 225, 250, or 260 contiguous aas) of that sequence (e.g., it may comprise 1-25, 1-5, 5-10, 10-15, 15-20, 20-25, or 25-30 aa insertions, deletions, and/or substitutions). The HLA-A*3303 heavy chain allele may be prominent in Asian populations, including populations of individuals of Asian descent.

[0248] In an embodiment, where the HLA-A*3303 or HLA-A*3401 heavy chain polypeptide of a T-Cell-MP has less than 100% identity to the sequence labeled HLA-A*3303 in FIG. 3D, it may comprise a substitution at one or more of positions 84 and/or 139 selected from: a tyrosine to alanine at position 84 (Y84A); a tyrosine to cysteine at position 84 (Y84C); and an alanine to cysteine at position 139 (A139C). The HLA-A*3303 or HLA-A*3401 heavy chain polypeptide sequence of a T-Cell-MP may comprise the Y84C and A139C substitutions.

[0249] (ii) HLA-B heavy chains.

[0250] The HLA-B heavy chain peptide sequences, or portions thereof, that may be incorporated into a T-Cell-MP include, but are not limited to, the alleles: B*0702, B*0801, B*1502, B*3802, B*4001, B*4601, and B*5301, which are aligned without all, or substantially all, of the leader, transmembrane and cytoplasmic sequences in FIG. 3F. Any of those alleles may comprise a substitution at one or more of positions 84 and/or 139 (as shown in FIG. 3F) selected from: a tyrosine to alanine at position 84 (Y84A); a tyrosine to cysteine at position 84 (Y84C); and an alanine to cysteine at position 139 (A139C). In addition, a HLA-B sequence having at least 75% (e.g., at least 80%, at least 85%, at least 90%, at least 95%, at least 98%, at least 99%) or 100% aa sequence identity to all or part (e.g., 50, 75, 100, 150, 200, 225, 250, or 260 contiguous aas) of the sequence of those HLA-B alleles may also be incorporated into a T-Cell-MP (e.g., it may comprise 1-25, 1-5, 5-10, 10-15, 15-20, 20-25, or 25-30 aa insertions, deletions, and/or substitutions). The HLA-B heavy chain polypeptide sequence of a T-Cell-MP may comprise the Y84C and A139C substitutions.

[0251] (a) HLA-B*0702 (HLA-B*07:02)

[0252] A MHC Class I heavy chain polypeptide of a T-Cell-MP or a T-Cell-MP-epitope conjugate may comprise an aa sequence of HLA-B*0702 (SEQ ID NO:25) in FIG. 3D (labeled HLA-B in FIG. 3D), HLA-B*03501, HLA-B*4402, HLA-B*4403, HLA-B*5801 or a sequence having at least 75% (e.g., at least 80%, at least 85%, at least 90%, at least 95%, at least 98%, at least 99%) or 100% aa sequence identity to all or part (e.g., 50, 75, 100, 150, 200, 225, 250, or 260 contiguous aas) of any of those sequences (e.g., it may comprise 1-25, 1-5, 5-10, 10-15, 15-20, 20-25, or 25-30 aa insertions, deletions, and/or substitutions). In an embodiment, where the HLA-B heavy chain polypeptide of a T-Cell-MP has less than 100% identity to the sequence labeled HLA-B in FIG. 3D, it may comprise a substitution at one or more of positions 84 and/or 139 selected from: a tyrosine to alanine at position 84 (Y84A); a tyrosine to cysteine at position 84 (Y84C); and an alanine to cysteine at position 139 (A139C). The HLA-B*0702 heavy chain polypeptide sequence of a T-Cell-MP may comprise the Y84C and A139C substitutions.

[0253] (b) HLA-B*3501 (HLA-B*35:01)

[0254] A MHC Class I heavy chain polypeptide of a T-Cell-MP or a T-Cell-MP-epitope conjugate may comprise an aa sequence of HLA-B*3501: GSHSMRYFYTAMSRPGRGEPRFIAVGYVDDTQ-FVRFDSDAASPRTEPRAPWIEQEGPEYWDRNTQIFKTNTQTYRESLRNLRGYYNQSEAGSHIIQR MYGCDLGPDGRLLRGHDQSAYDGKDYIALNEDLSSWTAADTAAQITQRKWEAARVAEQLRAY LEGLCVEWLRRYLENGKETLQRADPPKTHVTHHPVSDHEATLRCWALGFYPAEITLTWQRDGE DQTQDTELVETRPAGDRTFQKWAAVVVPSGEEQRYTCHVQHEGLPKPLTLRWEP (shown lacking its signal sequence and transmembrane/intracellular regions SEQ ID NO:80), or a sequence having at least 75% (e.g., at least 80%, at least 85%, at least 90%, at least 95%, at least 98%, at least 99%) or 100% aa sequence identity to all or part (e.g., 50, 75, 100, 150, 200, 225, 250, or 260 contiguous aas) of that sequence (e.g., it may comprise 1-25, 1-5, 5-10, 10-15, 15-20, 20-25, or 25-30 aa insertions, deletions, and/or substitutions). In an embodiment, the sequence may comprise a substitution at one or more of positions 84 and/or 139 selected from: a tyrosine to alanine at position 84 (Y84A); a tyrosine to cysteine at position 84 (Y84C); and an alanine to cysteine at position 139 (A139C). The HLA-B*3501 heavy chain polypeptide sequence of a T-Cell-MP may comprise the Y84C and A139C substitutions.

[0255] (c) HLA-B*4402 (HLA-B*44:02)

[0256] A MHC Class I heavy chain polypeptide of a T-Cell-MP or a T-Cell-MP-epitope conjugate may comprise an aa sequence of HLA-B*4402: GSHSMRYFYTAMSRPGRGEPRFITVGYVDDTL-FVRFDSDATSPRKEPRAPWIEQEGPEYWDRETQISKTNTQTYRENLRTALRYYNQSEAGSHIIQR MYGCDVGPDGRLLRGYDQDAYDGKDYIALNEDLSSWTAADTAAQITQRKWEAARVAEQDRA YLEGLCVESLRRYLENGKETLQRADPPKTHVTHHPISDHEVTLRCWALGFYPAEITLTWQRDGE DQTQDTELVETRPAGDRTFQKWAAVVVPSGEEQRYTCHVQHEGLPKPLTLRWEP (shown lacking its signal sequence and transmembrane/intracellular regions SEQ ID NO:81), or a sequence having at least 75% (e.g., at least 80%, at least 85%, at least 90%, at least 95%, at least 98%, at least 99%) or 100% aa sequence identity to all or part (e.g., 50, 75, 100, 150, 200, 225, 250, or 260 contiguous aas) of that sequence (e.g., it may comprise 1-25, 1-5, 5-10, 10-15, 15-20, 20-25, or 25-30 aa insertions, deletions, and/or substitutions). In an embodiment, the sequence may comprise a substitution at one or more of positions 84 and/or 139 selected from: a tyrosine to alanine at position 84 (Y84A); a tyrosine to cysteine at position 84 (Y84C); and an alanine to cysteine at position 139 (A139C). The HLA-B*4402 heavy chain polypeptide sequence of a T-Cell-MP may comprise the Y84C and A139C substitutions.

[0257] (d) HLA-B*4403 (HLA-B*44:03)

[0258] A MHC Class I heavy chain polypeptide of a T-Cell-MP or a T-Cell-MP-epitope conjugate may comprise an aa sequence of HLA-B*4403: GSHSMRYFYTAMSRPGRGEPRFITVGYVDDT-LFVRFDSDATSPRKEPRAPWIEQEGPEYWDRETQISKTNTQTYRENLRTALRYYNQSEAGSHIIQR MYGCDVGPDGRLLRGYDQDAYDGKDYIALNEDLSSWTAADTAAQITQRKWEAARVAEQLRA YLEGLCVESLRRYLENGKETLQRADPPKTHVTHHPISDHEVTLRCWALGFYPAEITLTWQRDGE DQTQDTELVETRPAGDRTFQKWAAVVVPSGEEQRYTCHVQHEGLPKPLTLRWEP (shown lacking its signal sequence and transmembrane/intracellular regions SEQ ID NO:82), or a sequence having at least 75% (e.g., at least 80%, at least 85%, at least 90%, at least 95%, at least 98%, at least 99%) or 100% aa sequence identity to all or part (e.g., 50, 75, 100, 150, 200, 225, 250, or 260 contiguous aas) of that sequence (e.g., it may comprise 1-25, 1-5, 5-10, 10-15, 15-20, 20-25, or 25-30 aa insertions, deletions, and/or substitutions). In an embodiment, the sequence may comprise a substitution at one or more of positions 84 and/or 139 selected from: a tyrosine to alanine at position 84 (Y84A); a tyrosine to cysteine at position 84 (Y84C); and an alanine to cysteine at position 139 (A139C). The HLA-B*4403 heavy chain polypeptide sequence of a T-Cell-MP may comprise the Y84C and A139C substitutions.

[0259] (e) HLA-B*5801 (HLA-B*58:01)

[0260] A MHC Class I heavy chain polypeptide of a T-Cell-MP or a T-Cell-MP-epitope conjugate may comprise an aa sequence of HLA-B*58:01: GSHSMRYFYTAMSRPGRGEPRFIAVGYVDDTQFVRFDSDAASPRTEPRAPWIEQEGPEYWDGET RNMKASAQTYRENLRIALRYYNQSEAGSHIIQRMYGCDLGPDGRLLRGHDQSAYDGKDYIALN EDLSSWTAADTAAQITQRKWEAARVAEQLRAYLEGLCVEWLRRYLENGKETLQRADPPKTHVT HHPVSDHEATLRCWALGFYPAEITLTWQRDGEDQTQDTELVETRPAGDRTFQKWAAVVVPSGE EQRYTCHVQHEGLPKPLTLRWEP (shown lacking its signal sequence and transmembrane/intracellular regions SEQ ID NO:83), or a sequence having at least 75% (e.g., at least 80%, at least 85%, at least 90%, at least 95%, at least 98%, at least 99%) or 100% aa sequence identity to all or part (e.g., 50, 75, 100, 150, 200, 225, 250, or 260 contiguous aas) of that sequence (e.g., it may comprise 1-25, 1-5, 5-10, 10-15, 15-20, 20-25, or 25-30 aa insertions, deletions, and/or substitutions). In an embodiment, the sequence may comprise a substitution at one or more of positions 84 and/or 139 selected from: a tyrosine to alanine at position 84 (Y84A); a tyrosine to cysteine at position 84 (Y84C); and an alanine to cysteine at position 139 (A139C). The HLA-B*5901 heavy chain polypeptide sequence of a T-Cell-MP may comprise the Y84C and A139C substitutions.

[0261] (iii) HLA-C Heavy Chains

[0262] The HLA-C heavy chain peptide sequences, or portions thereof, that may be incorporated into a T-Cell-MP include, but are not limited to, the alleles: C*0102, C*0303, C*0304, C*0401, C*0602, C*0701, C*0702, C*0801, and C*1502, which are aligned without all, or substantially all, of the leader, transmembrane and cytoplasmic sequences in FIG. 3G. Any of those alleles may comprise a substitution at one or more of positions 84, 139 and/or 236 (as shown in FIG. 3G) selected from: a tyrosine to alanine at position 84 (Y84A); a tyrosine to cysteine at position 84 (Y84C); and an alanine to cysteine at position 139 (A139C). In addition, an HLA-C sequence having at least 75% (e.g., at least 80%, at least 85%, at least 90%, at least 95%, at least 98%, at least 99%) or 100% aa sequence identity to all or part (e.g., 50, 75, 100, 150, 200, 225, 250, or 260 contiguous aas) of the sequence of those HLA-C alleles may also be incorporated into a T-Cell-MP (e.g., it may comprise 1-25, 1-5, 5-10, 10-15, 15-20, 20-25, or 25-30 aa insertions, deletions, and/or substitutions). The HLA-C heavy chain polypeptide sequence of a T-Cell-MP may comprise the Y84C and A139C substitutions.

[0263] (a) HLA-C*701 (HLA-C*07:01) and HLA-C*702 (HLA-C*07:02)

[0264] A MHC Class I heavy chain polypeptide of a T-Cell-MP or a T-Cell-MP-epitope conjugate may comprise an aa sequence of HLA-C*701 (SEQ ID NO:23) or HLA-C*702 (SEQ ID NO:54) in FIG. 3G (labeled HLA-C in FIG. 3D), or a sequence having at least 75% (e.g., at least 80%, at least 85%, at least 90%, at least 95%, at least 98%, at least 99%) or 100% aa sequence identity to all or part (e.g., 50, 75, 100, 150, 200, 225, 250, or 260 contiguous aas) of those sequences (e.g., it may comprise 1-25, 1-5, 5-10, 10-15, 15-20, 20-25, or 25-30 aa insertions, deletions, and/or substitutions relative to those sequences). In an embodiment, where the HLA-C heavy chain polypeptide of a T-Cell-MP has less than 100% identity to the sequence labeled HLA-C in FIG. 3D, it may comprise a substitution at one or more of positions 84 and/or 139 selected from: a tyrosine to alanine at position 84 (Y84A); a tyrosine to cysteine at position 84 (Y84C); and an alanine to cysteine at position 139 (A139C). The HLA-C*701 or HLA-C*0702 heavy chain polypeptide sequence of a T-Cell-MP may comprise the Y84C and A139C substitutions.

[0265] (iv) Non-Classical HLA-E, F and G Heavy Chains

[0266] The non-classical HLA heavy chain peptide sequences, or portions thereof, that may be incorporated into a T-Cell-MP include, but are not limited to, those of the HLA-E, F, and/or G alleles. Sequences for those alleles, (and the HLA-A, B and C alleles) may be found on the World Wide Web at, for example, hla.alleles.org/nomenclature/index.html, the European Bioinformatics Institute (www.ebi.ac.uk), which is part of the European Molecular Biology Laboratory (EMBL), and the National Center for Biotechnology Information (www.ncbi.nlm.nih.gov).

[0267] Some suitable HLA-E alleles include, but are not limited to, HLA-E*0101 (HLA-E*01:01:01:01), HLA-E*01:03(HLA-E*01:03:01:01), HLA-E*01:04, HLA-E*01:05, HLA-E*01:06, HLA-E*01:07, HLA-E*01:09, and HLA-E*01:10. Some suitable HLA-F alleles include, but are not limited to, HLA-F*0101 (HLA-F*01:01:01:01), HLA-F*01:02, HLA-F*01:03(HLA-F*01:03:01:01), HLA-F*01:04, HLA-F*01:05, and HLA-F*01:06. Some suitable HLA-G alleles include, but are not limited to, HLA-G*0101 (HLA-G*01:01:01:01), HLA-G*01:02, HLA-G*01:03(HLA-G*01:03:01:01), HLA-G*01:04 (HLA-G*01:04:01:01), HLA-G*01:06, HLA-G*01:07, HLA-G*01:08, HLA-G*01:09: HLA-G*01:10, HLA-G*01:11, HLA-G*01:12, HLA-G*01:14, HLA-G*01:15, HLA-G*01:16, HLA-G*01:17, HLA-G*01:18: HLA-G*01:19, HLA-G*01:20, and HLA-G*01:22. Consensus sequences for those HLA-E, -F, and -G alleles without all, or substantially all, of the leader, transmembrane and cytoplasmic sequences are provided in FIG. 3H, and aligned with consensus sequences of the above-mentioned HLA-A, -B, and -C alleles provided in FIGS. 3E-3G and in FIG. 3I.

[0268] Any of the above-mentioned HLA-E, F and/or G alleles may comprise a substitution at one or more of positions 84 and/or 139 as shown in FIG. 3I for the consensus sequences. In an embodiment, the substitutions may be selected from: a position 84 tyrosine to alanine (Y84A) or cysteine (Y84C), or in the case of HLA-F a R84A or R84C substitution; and/or a position 139 alanine to cysteine (A139C), or in the case of HLA-F a V139C substitution. In addition, HLA-E, -F, and/or -G sequences having at least 75% (e.g., at least 80%, at least 85%, at least 90%, at least 95%, at least 98%, at least 99%) or 100% aa sequence identity to all or part (e.g., 50, 75, 100, 150, 200, 225, 250, or 260 contiguous aas) of any of the consensus sequences set forth in FIG. 3I may also be employed (e.g., the sequences may comprise 1-25, 1-5, 5-10, 10-15, 15-20, 20-25, or 25-30 aa insertions, deletions, and/or substitutions in addition to changes at variable residues listed therein). The HLA-E, F, or G heavy chain polypeptide sequence of a T-Cell-MP may comprise a cysteine at both position 84 and 139.

[0269] (v) Mouse H2K

[0270] A MHC Class I heavy chain polypeptide of a T-Cell-MP or a T-Cell-MP-epitope conjugate may comprise an aa sequence of MOUSE H2K (SEQ ID NO:28) (MOUSE H2K in FIG. 3D), or a sequence having at least 75%, at least 80%, at least 85%, at least 90%, at least 95%, at least 98%, at least 99%, or 100% aa sequence identity to all or part (e.g., 50, 75, 100, 150, 200, 225, 250, or 260 contiguous aas) of that sequence (e.g., it may comprise 1-30, 1-5, 5-10, 10-15, 15-20, 20-25, or 25-30 aa insertions, deletions, and/or substitutions). In an embodiment, where the MOUSE H2K heavy chain polypeptide of a T-Cell-MP has less than 100% identity to the sequence labeled MOUSE H2K in FIG. 3D, it may comprise a substitution at one or more of positions 84 and/or 139 selected from: a tyrosine to alanine at position 84 (Y84A); a tyrosine to cysteine at position 84 (Y84C); and an alanine to cysteine at position 139 (A139C). The MOUSE H2K heavy chain polypeptide sequence of a T-Cell-MP may comprise the Y84C and A139C substitutions.

[0271] (vi) The Effect of Amino Acid Substitutions in MHC Polypeptides on T-Cell-MPs

[0272] (a) Substitutions at Positions 84 and 139

[0273] Substitution of position 84 of the MHC H chain (see FIG. 3I), particularly when it is a tyrosine residue, with a small amino acid such as alanine (Y84A) tends to open one end of the MHC binding pocket, allowing a linker (e.g., attached to a peptide epitope) to “thread” through the end of the pocket, and accordingly, permits a greater variation in the size of the epitope (e.g., longer peptides bearing epitope sequences) that can fit into the MHC pocket and be presented by the T-Cell-MP. Alternatively, the MHC-H (e.g., HLA-heavy chain) of a T-Cell-MP may be substituted with cysteines to form an intrachain disulfide bond between a cysteine substituted into the carboxyl end portion of the α1 helix and a cysteine in the amino end portion of the α2-1 helix (e.g., amino acids 84 and 139). Such disulfide bonds stabilize the MHC-H polypeptide sequence of a T-Cell-MP, and permit its translation, cellular processing, and excretion from eukaryotic cells in the absence of a bound peptide epitope (or null peptide). Any combination of substitutions provided in the table provide below at residues 84 and 130 may be combined with any combination of substitutions in the epitope binding cleft, such as those described at positions 116 and 167.

[0274] (b) Substitutions at Positions 116 and 167

[0275] Any MHC Class I heavy chain sequences (including those disclosed above for: the HLA-A*0101; HLA-A*0201; HLA-A*1101; HLA-A*2402; HLA-A*3303; HLA-B; HLA-C; Mouse H2K, or any of the other HLA-A, B, C, E, F, and/or G sequence disclosed herein) may further comprise a cysteine substitution at position 116 (e.g., Y116C) or at position 167.

[0276] As with aa position 84 substitutions that open one end of the MHC-H binding pocket (e.g., Y84A or its equivalent), substitution of an alanine or glycine at position 167 (e.g., a W167A substitution or its equivalent) opens the other end of the MHC binding pocket, creating a groove that permits greater variation (e.g., longer length) of the peptide epitopes that may be presented by the T-Cell-MP-epitope conjugates. Substitutions at positions 84 and/or 167, or their equivalent (e.g., Y84A in combination with W167A or W167G) may be used in combination to modify the binding pocket of MHC-H chains. A cysteine substitution at positions 116 (e.g., Y116C) and/or 167 (e.g., W167C) may be used separately or in combination to anchor epitopes (e.g., peptide epitopes) in one or two locations (e.g., the ends of the epitope containing peptide). Substitutions at positions 116 and/or 167 may be combined with substitutions including those at positions 84 and/or 139 described above.

[0277] The Table below lists some MHC heavy chain sequence modifications that may be incorporated into a T-Cell-MPs.

[0278] Some Combinations of MHC Class 1 Heavy Chain Sequence Modifications that May be Incorporated into a T-Cell-MP or its Epitope Conjugate

| | HLA Heavy | | Substitutions at | Substitutions at |
|---|---|---|---|---|
| | Chain Sequence | | aa positions 84 | positions 116 |
| Entry | From FIGs. 3D-H | Sequence Identity Range □ | and/or 139 | and/or 167 |
| 1 | HLA-A | 75%-99.8%, 80%-99.8%, 85%-99.8%, | None; Y84C; | None; Y116C; |
| | Consensus | 90%-99.8%, 95%-99.8%, 98%-99.8%, | Y84A; A139C; | W167A; W167C; |
| | FIG. 3E | or 99%-99.8%; or 1-25, 1-5, 5-10, | or (Y84C & | or (Y116C & |
| | | 10-15, 15-20, or 20-25 aa insertions, | A139C) | W167C) |
| | | deletions, and/or substitutions (not | | |
| | | counting variable residues) | | |
| 2 | A*0101, A*0201, | 75%-99.8%, 80%-99.8%, 85%-99.8%, | None; Y84C; | None; Y116C; |
| | A*0301, A*1101, | 90%-99.8%, 95%-99.8%, 98%-99.8%, | Y84A; A139C; | W167A; W167C; |
| | A*2402, A*2301, | or 99%-99.8%; or 1-25, 1-5, 5-10, | or (Y84C & | or (Y116C & |
| | A*2402, A*2407, | 10-15, 15-20, or 20-25 aa insertions, | A139C) | W167C) |
| | A*3303, or | deletions, and/or substitutions | | |
| | A*3401 | | | |
| 3 | HLA-B | 75%-99.8%, 80%-99.8%, 85%-99.8%, | None; Y84C; | None; Y116C; |
| | Consensus | 90%-99.8%, 95%-99.8%, 98%-99.8%, | Y84A; A139C; | W167A; W167C; |
| | FIG. 3F | or 99%-99.8%; or 1-25, 1-5, 5-10, | or (Y84C & | or (Y116C & |
| | | 10-15, 15-20, or 20-25 aa insertions, | A139C) | W167C) |
| | | deletions, and/or substitutions (not | | |
| | | counting variable residues) | | |
| 4 | B*0702, B*0801, | 75%-99.8%, 80%-99.8%, 85%-99.8%, | None; Y84C; | None; Y116C; |
| | B*1502, B*3501, | 90%-99.8%, 95%-99.8%, 98%-99.8%, | Y84A; A139C; | W167A; W167C; |
| | B*3802, B*4001, | or 99%-99.8%; or 1-25, 1-5, 5-10, | or (Y84C & | or (Y116C & |
| | B*4402, B*4403, | 10-15, 15-20, or 20-25 aa insertions, | A139C) | W167C) |
| | B*4601, B*5301, | deletions, and/or substitutions | | |
| | or B*5801 | | | |
| 5 | HLA-C | 75%-99.8%, 80%-99.8%, 85%-99.8%, | None; Y84C; | None; Y116C; |
| | Consensus | 90%-99.8%, 95%-99.8%, 98%-99.8%, | Y84A; A139C; | W167A; W167C; |
| | FIG. 3G | or 99%-99.8%; or 1-25, 1-5, 5-10, | or (Y84C & | or (Y116C & |
| | | 10-15, 15-20, or 20-25 aa insertions, | A139C) | W167C) |
| | | deletions, and/or substitutions (not | | |
| | | counting variable residues) | | |
| 6 | C*0102, C*0303, | 75%-99.8%, 80%-99.8%, 85%-99.8%, | None; Y84C; | None; Y116C; |
| | C*0304, C*0401, | 90%-99.8%, 95%-99.8%, 98%-99.8%, | Y84A; A139C; | W167A; W167C; |
| | C*0602, C*0701, | or 99%-99.8%; or 1-25, 1-5, 5-10, | or (Y84C & | or (Y116C & |
| | C*702, C*0801, | 10-15, 15-20, or 20-25 aa insertions, | A139C) | W167C) |
| | or C*1502 | deletions, and/or substitutions | | |
| 7 | HLA-E, | 75%-99.8%, 80%-99.8%, 85%-99.8%, | None; Y84C; | None; Y116C; |
| | F, or G | 90%-99.8%, 95%-99.8%, 98%-99.8%, | Y84A; A139C; | W167A; W167C; |
| | Consensus | or 99%-99.8%; or 1-25, 1-5, 5-10, | or (Y84C & | or (Y116C & |
| | FIG. 3H | 10-15, 15-20, or 20-25 aa insertions, | A139C) | W167C) |
| | | deletions, and/or substitutions (not | | |
| | | counting variable residues) | | |
| 8 | MOUSE H2K | 75%-99.8%, 80%-99.8%, 85%-99.8%, | None; Y84C; | None; Y116C; |
| | | 90%-99.8%, 95%-99.8%, 98%-99.8%, | Y84A; A139C; | W167A; W167C; |
| | | or 99%-99.8%; or 1-25, 1-5, 5-10, | or (Y84C & | or (Y116C & |
| | | 10-15, 15-20, or 20-25 aa insertions, | A139C) | W167C) |
| | | deletions, and/or substitutions | | |

□ The Sequence Identity Range is the permissible range in sequence identity of a MHC-H polypeptide sequence incorporated into a T-Cell-MP relative to the corresponding portion of the sequences listed in FIG. 3D-3H not counting the variable residues when the consensus sequences are used for the comparison.

[0279] b. MHC Class I β2-Microglobins and Combinations with MHC-H Polypeptides

[0280] A β2M polypeptide of a T-Cell-MP can be a human β2M polypeptide, a non-human primate β2M polypeptide, a murine β2M polypeptide, and the like. In some instances, a β2M polypeptide comprises an aa sequence having at least 75%, at least 80%, at least 85%, at least 90%, at least 95%, at least 98%, at least 99%, or 100% aa sequence identity to a β2M aa sequence (e.g., a mature β2M sequence) depicted in FIG. 4. The β2M polypeptide of a T-Cell-MP may comprise an aa sequence having at least 75%, at least 80%, at least 85%, at least 90%, at least 95%, at least 98%, at least 99%, or 100% aa sequence identity to aas 21 to 119 of a β2M aa sequence depicted in FIG. 4, which may include a cysteine or other aa substitution or insertion as a chemical conjugation site for epitope attachment (e.g., and E44C substitution) when the identity is less than 100%. Chemical conjugation sites may be located at, for example, solvent accessible locations in the β2M polypeptide sequence.

[0281] The β2M polypeptide sequence of a T-Cell-MP may have at least 90% (e.g., at least 95% or 98%) or 100% sequence identity to at least 70 (e.g., at least 80, 90, 96, 97, 98 or all) contiguous aas of a mature human β2M polypeptide (e.g., aas 21-119 of NCBI accession number NP_004039.1 provided in FIG. 4). By way of example, a β2M polypeptide sequence of a T-Cell-MP may have up to six (e.g., 1, 2, 3, 4, 5, or 6) aa substitutions within an aa segment of at least 70 (e.g., at least 80, 90, 96, 97, or 98 or all) contiguous aas of a mature human β2M polypeptide (e.g., aas 21-119 of NCBI accession number NP_004039.1 provided in FIG. 4), and may comprise the chemical conjugation site for attachment of an epitope (e.g., an E44C substitution in the mature peptide). As noted above, in such β2M polypeptide sequences the chemical conjugation sites of epitopes may be located at a variety of locations including solvent accessible aa positions. For example, a cysteine or other amino acid substitution or insertion at a solvent accessible amino acid position can provide a chemical conjugation site for direct or indirect (e.g., through a peptide linker) attachment of an epitope.

[0282] Some solvent accessible positions of mature β2M polypeptides lacking their leader sequence include aa positions 2, 14, 16, 34, 36, 44, 45, 47, 48, 50, 58, 74, 77, 85, 88, 89, 91, 94, and 98 (Gln 2, Pro 14, Glu 16, Asp 34, Glu 36, Glu 44, Arg 45, Glu 47, Arg 48, Glu 50, Lys 58, Glu 74, Glu 77, Val 85, Ser 88, Gln 89, Lys 91, Lys 94, and Asp 98) of the mature peptide from NP_004039.1, or their corresponding amino acids in other β2M sequences (see the sequence alignment in FIG. 4). The solvent accessible locations for chemical conjugation sites (e.g., a cysteine or another reactive aa substitution) may be selected from positions 2, 44, 50, 77, 85, 88, 91, or 98 of a mature β2M polypeptide sequence such as NP_004039.1, or the corresponding aa positions in other β2M sequences such as those in FIG. 4. The solvent accessible locations for chemical conjugation sites (e.g., a cysteine or another reactive aa substitution) may also be selected from positions 2, 44, 50, or 98 of a mature β2M polypeptide sequence such as NP_004039.1, or the corresponding aa positions in other β2M sequences such as those in FIG. 4. The solvent accessible locations for chemical conjugation sites (e.g., a cysteine or another reactive aa substitution) may be selected from positions 2 or 44 (Glu 2 or Glu 44) of a mature β2M polypeptide sequence such as NP_004039.1, or the corresponding aa positions in other β2M sequences such as those in FIG. 4.

[0283] A β2M polypeptide sequence may comprise a single cysteine substituted into a wt. β2M polypeptide (e.g., a β2M sequence in FIG. 4). Such cysteine residues, when present in a T-Cell-MP polypeptide, can act as a chemical conjugation site for the covalent coupling of an epitope (either directly or indirectly through a linker). The covalent attachment may be in the form of a bond made to a reactive group in or attached to the epitope, such as a maleimide group incorporated into the epitope or a linker attached to the peptide epitope, or in the form of a disulfide bond. For example, in some cases, one of amino acids 43, 44, or 45 of the mature β2M lacking its signal sequence (residues 63, 64, and 65 of the unprocessed proteins as shown with their signal sequences in FIG. 4) may be substituted with a cysteine residue. The aa position substituted with a cysteine may be position 44 (e.g., an E44C substitution of the mature human protein NP_004039.1 or a corresponding aa substitution in a β2M sequence such as those in FIG. 4). Alternatively, the aa position substituted with a cysteine may be position 2 (e.g., a Q44C substitution of the mature human protein NP_004039.1 or a corresponding aa substitution in a β2M sequence such as those in FIG. 4).

[0284] c. Some Combinations of Substitutions in the MHC-H and the β2M Polypeptide Sequences

[0285] Separately, or in addition to, any cysteine residues inserted into the MHC-H or β2M polypeptide sequence of a T-Cell-MP that may function as a chemical conjugation site for an epitope or a payload (e.g., an E44C substitution in a β2M polypeptide sequence that provides a chemical conjugation site for an epitope), a T-Cell-MP may comprise an intrachain disulfide bond between a cysteine substituted into the carboxyl end portion of the α1 helix and a cysteine in the amino end portion of the α2-1 helix (e.g., amino acids at aa positions 84 and 139, such as Y84C and A139C). The carboxyl end portion of the α1 helix is from about aa position 79 to about aa position 89 and the amino end portion of the α2-1 helix is from about aa position 134 to about aa position 144 of the MHC-H chain (the aa positions are determined based on the sequence of the heavy chains without their leader sequence (see, e.g., FIGS. 3D-3H). Accordingly, a disulfide bond may be between a cysteine located at positions 83, 84, or 85 and a cysteine located at any of positions 138, 139 or 140 of the MHC-H polypeptide sequence. For example, in a T-Cell-MP a disulfide bond may be formed between a cysteine inserted at position 84 and a cysteine inserted at any of positions 138, 139 or 140 of the MHC-H polypeptide sequence. In one aspect, the MHC-H intrachain disulfide bond is between cysteines substituted at positions 84 and 139 of any of the heavy chain sequences set forth in FIGS. 3D-3H.

[0286] A T-Cell-MP may comprise a combination of: (i) a mature β2M polypeptide sequence having at least 90% (e.g., at least 95% or 98%) sequence identity to at least 70 (e.g., at least 80, 90, 96, 97, 98 or all) of aas 21-119 of NP_004039.1 with an E44C (or another cysteine substitution) as a chemical conjugation site for an epitope; and (ii) a HLA Class I heavy chain polypeptide sequence having at least 90% sequence identity (e.g., at least 95%, 98%, or 100% sequence identity) excluding variable aa clusters 1-4 to: GSHSMRYFFTSVSRPGRGEPRFIAVGYVDDTQFVRFDSDAASQRMEPRAPWIEQEGPEYWD GETRKVKAHSQTHRVDL(aa cluster 1){C}(aa cluster 2)AGSHTVQRMYGCDVGSDWRFLRGYHQ YAYDGKDYIALKEDLRSW(aa cluster 3){C}(aa cluster 4) (a 2×hIL2(F42A,H16A)-(G4S)-GMGGSG GGGS-(G4S)-β2M (E44C)-(G4S)3-HLA-A02(Y84C,A139C)-AAAGG-hIgG1(L234A,L235A)HKWEA AHVAEQLRAYLEGTCVEWLRRYLENGKETLQRTDAPKTHMTHHAVSDHEATLRCWALSFYPA EITLTWQRDGEDQTQDTELVETRPAGDGTFQKWAAVVVPSGQEQRYTCHVQHEGLPKPLTLRW EP (SEQ ID NO:84);

[0287] where the cysteine residues indicated as {C} form a disulfide bond between the α1 and α2-1 helices.

[0288] Each occurrence of aa cluster 1, aa cluster 2, aa cluster 3, aa cluster 4, aa cluster 5, and aa cluster 6 is independently selected to be 1-5 aa residues, wherein the aa residues are each selected independently from i) any naturally occurring (proteinogenic) aa or ii) any naturally occurring aa except proline or glycine. The MHC-H polypeptide sequence may be an HLA-A chain, wherein:
[0289] aa cluster 1 may be the amino acid sequence GTLRG (SEQ ID NO:85) or that sequence with one or two aas deleted or substituted with other naturally occurring aas (e.g., L replaced by I, V, A or F);
[0290] aa cluster 2 may be the amino acid sequence YNQSE (SEQ ID NO:86) or that sequence with one or two aas deleted or substituted with other naturally occurring aas (e.g., N replaced by Q, Q replaced by N, and/or E replaced by D);
[0291] aa cluster 3 may be the amino acid sequence TAADM (SEQ ID NO:87) or that sequence with one or two aas deleted or substituted with other naturally occurring aas (e.g., T replaced by S, A replaced by G, D replaced by E, and/or M replaced by L, V, or I); and/or aa cluster 4 may be the amino acid sequence AQTTK (SEQ ID NO:88) or that sequence with one or two aas deleted or substituted with other naturally occurring aas (e.g., A replaced by G, Q replaced by N, or T replaced by S, and or K replaced by R or Q).

[0292] As noted above, any of the MHC-H intrachain disulfide bonds, including a disulfide bond between cysteines at 84 and 139 (a Y84C and A139C disulfide), may be combined with substitutions that permit incorporation of a peptide epitope into a T-Cell-MP. Accordingly, the present disclosure includes and provides for T-Cell-MPs and their higher order complexes (e.g., duplexes) comprising one or more T-Cell-MP polypeptides having a MHC-H polypeptide sequence with an intrachain Y84C A139C disulfide bond and an E44C substitution in the β2M polypeptide sequence. T-Cell-MPs and their higher order complexes (e.g., duplexes) may comprise: (i) a mature β2M polypeptide sequence with an E44C substitution having at least 90% (e.g., at least 95% or 98%) sequence identity to at least 70 (e.g., at least 80, 90, 96, 97, 98 or all) of aas 21-119 of any one of NP_004039.1, NP_001009066.1, NP_001040602.1, NP_776318.1, or NP_033865.2 (SEQ ID NOs:61 to 65, see FIG. 4); and (ii) a MHC-H sequence with Y84C and A139C substitutions (that form a disulfide bond) may have at least 85% (e.g., at least 90%, at least 95% or 98%) or 100% sequence identity to at least 200 (e.g., at least 225, at least 250, at least 260, or at least 275) contiguous aas of the α1, α2, and α3 domains an HLA-A, -B, -C, -E, -F, or -G sequences in FIGS. 3D-3H. The MHC-H polypeptide sequence may be a HLA-A*0101, HLA-A*0201, HLA-A*1101, HLA-A*2402, HLA-A*3303, or HLA-A*3401 polypeptide sequence having Y84C and A139C substitutions (see FIG. 3E). The MHC-H polypeptide sequence may be a HLA-B*0702, HLA-B*0801, HLA-B*1502, B27 (subtypes HLA-B*2701-2759), HLA-B*3802, HLA-B*4001, HLA-B*4601, or HLA-B*5301 polypeptide sequence having Y84C and A139C substitutions (see, e.g., FIG. 3F). The MHC-H polypeptide sequence may be a HLA-C*0102, HLA-C*0303, HLA-C*0304, HLA-C*0401, HLA-C*0602, HLA-C*0701, HLA-C*0702, HLA-C*0801, or HLA-C*1502 polypeptide sequence having Y84C and A139C substitutions (see, e.g., FIG. 3G).

### 4 Scaffold Polypeptides

[0293] T-Cell-MPs and T-Cell-MP-epitope conjugates may comprise an immunoglobulin heavy chain constant region (“Ig Fc” or “Fc”) polypeptide, or may comprise another suitable scaffold polypeptide. Where scaffold polypeptide sequences are identical and pair or multimerize (e.g., some Ig Fc sequences or leucine zipper sequences), they can form symmetrical pairs or multimers (e.g., homodimers, see e.g., FIG. 9 with an Fc scaffold). In contrast, where an asymmetric pairing between two T-Cell-MP molecules is desired (e.g., to produce a duplex T-Cell-MP with each bearing one or more different MODs), the scaffold polypeptides present in the T-Cell-MP may comprise interspecific binding sequences. Interspecific binding sequences are non-identical polypeptide sequences that selectively interact with their specific complementary counterpart sequence to form asymmetric pairs (heterodimers, see e.g., FIG. 10 with an interspecific Fc scaffold). Interspecific binding sequences may in some instances form some amount of homodimers, but preferentially dimerize by binding more strongly) with their counterpart interspecific binding sequence. Accordingly, specific heterodimers tend to be formed when an interspecific dimerization sequence and its counterpart interspecific binding sequence are incorporated into a pair of polypeptides. By way of example, where an interspecific dimerization sequence and its counterpart are incorporated into a pair of polypeptides they may selectively form greater than 70%, 80%, 90%, 95%, 98% or 99% heterodimers when an equimolar mixture of the polypeptides are combined. The remainder of the polypeptides may be present as monomers or homodimers, which may be separated from the heterodimer. Moreover, because interspecific sequences are selective for their counterpart sequence, they can limit the interaction with other proteins expressed by cells (e.g., in culture or in a subject) particularly where the interspecific sequences are not naturally occurring or are variants of naturally occurring protein sequences.

[0294] Scaffold polypeptide sequences generally may be less than 300 aa (e.g., about 100 to about 300 aa). Scaffold polypeptide sequences may be less than 250 aa (e.g., about 75 to about 250 aa). Scaffold polypeptide sequences may be less than 200 aa (e.g., about 60 to about 200 aa). Scaffold polypeptide sequences may be less than 150 aa (e.g., about 50 to about 150 aa).

[0295] Scaffold polypeptide sequences include, but are not limited to, interspecific and non-interspecific Ig Fc polypeptide sequences, however, polypeptide sequences other than Ig Fc polypeptide sequences (non-Immunoglobulin sequences) may be used as scaffolds.

[0296] a. Non-Immunoglobulin Fc Scaffold Polypeptides

[0297] Non-immunoglobulin Fc scaffold polypeptides include, but are not limited to: albumin, XTEN (extended recombinant); transferrin; Fc receptor, elastin-like; albumin-binding; silk-like (see, e.g., Valluzzi et al. (2002) Philos Trans R Soc Loud B Biol Sci. 357:165); a silk-elastin-like (SELP; see, e.g., Megeed et al. (2002) Adv Drug Deliv Rev. 54:1075) polypeptides; and the like. Suitable XTEN polypeptides include, e.g., those disclosed in WO 2009/023270, WO 2010/091122, WO 2007/103515, US 2010/0189682, and US 2009/0092582; see, also, Schellenberger et al. (2009) Nat Biotechnol. 27:1186). Suitable albumin polypeptides include, e.g., human serum albumin. Suitable elastin-like polypeptides are described, for example, in Hassouneh et al. (2012) Methods Enzymol. 502:215.

[0298] Other non-immunoglobulin Fc scaffold polypeptide sequences include but are not limited to: polypeptides of the collectin family (e.g., ACRP30 or ACRP30-like proteins) that contain collagen domains consisting of collagen repeats Gly-Xaa-Yaa and/or Gly-Xaa-Pro (which may be repeated from 10-40 times); coiled-coil domains; leucine-zipper domains; Fos/Jun binding pairs; Ig CH1 and light chain constant region C_{L} sequences (Ig CH1/C_{L} pairs such as a Ig CH1 sequence paired with a Ig C_{L}, κ or C_{L} λ light chain constant region sequence).

[0299] Non-immunoglobulin Fc scaffold polypeptides can be interspecific or non-interspecific in nature. For example, both Fos/Jun binding pairs and Ig CH1 polypeptide sequences and light chain constant region C_{L} sequences form interspecific binding pairs. Coiled-coil sequences, including leucine zipper sequences, can be either interspecific leucine zipper or non-interspecific leucine zipper sequences. See e.g., Zeng et al., (1997) PNAS (USA) 94:3673-3678; and Li et al., (2012), Nature Comms. 3:662.

[0300] The scaffold polypeptides of a duplex T-Cell-MP may each comprise a leucine zipper polypeptide sequence. The leucine zipper polypeptides bind to one another to form a dimer. Non-limiting examples of leucine-zipper polypeptides include a peptide comprising any one of the following aa sequences: RMKQIEDKIEEILSKIYHIENEIARIKKLIGER (SEQ ID NO:89); LSSIEKKQEEQTS-WLIWISNELTLIRNELAQS (SEQ ID NO:90); LSSIEKKLEEITSQLIQISNELTLIRNELAQ (SEQ ID NO:91; LSSIEKKLEEITSQLIQIRNELTLIRNELAQ (SEQ ID NO:92); LSSIEKKLEEITSQLQQ-IRNELTLIRNELAQ (SEQ ID NO:93); LSSLEKKLEELTSQLIQLRNELTLLRNELAQ (SEQ ID NO:94); ISSLEKKIEELTSQIQQLRNEITLLRNEIAQ (SEQ ID NO:95). In some cases, a leucine zipper polypeptide comprises the following aa sequence: LEIEAAFLERENTALETRVAELRQRVQRLRNRV-SQYRTRYGPLGGGK (SEQ ID NO:96). Additional leucine-zipper polypeptides are known in the art, a number of which are suitable for use as scaffold polypeptide sequences.

[0301] The scaffold polypeptide of a T-Cell-MP may comprise a coiled-coil polypeptide sequence that forms a dimer. Non-limiting examples of coiled-coil polypeptides include, for example, a peptide of any one of the following aa sequences: LKSVENRLAVVENQLKTVIEELKTVKDLLSN (SEQ ID NO:97); LARIEEKLKTIKAQLSEIASTLNMIREQLAQ (SEQ ID NO:98); VSRLEEKVKTLKSQVTELAS-TVSLLREQVAQ (SEQ ID NO:99); IQSEKKIEDISSLIGQIQSEITLIRNEIAQ (SEQ ID NO:100); and LMSLEKKLEELTQTLMQLQNELSMLKNELAQ (SEQ ID NO:101).

[0302] The T-Cell-MPs of a T cell MP duplex may comprise a pair of scaffold polypeptide sequences that each comprise at least one cysteine residue that can form a disulfide bond permitting homodimerization or heterodimerization of those polypeptides stabilized by an interchain disulfide bond between the cysteine residues. Examples of such aa sequences include: VDLEGSTSNGRQCAGIRL (SEQ ID NO:102); EDDVTTTEELAPALVPPPKGTCAGWMA (SEQ ID NO:103); and GHDQE-TTTQGPGVLLPLPKGACTGQMA (SEQ ID NO:104).

[0303] Some scaffold polypeptide sequences permit formation of T-Cell-MP complexes of higher order than duplexes, such as triplexes, tetraplexes, pentaplexes or hexaplexes. Such aa sequences include, but are not limited to, IgM constant regions (discussed below). Collagen domains, which form trimers, can also be employed. Collagen domains may comprise the three aa sequence Gly-Xaa-Xaa and/or GlyXaaYaa, where Xaa and Yaa are independently any aa, with the sequence appear or are repeated multiple times (e.g., from 10 to 40 times). In Gly-Xaa-Yaa sequences, Xaa and Yaa are frequently proline and hydroxyproline respectively in greater than 25%, 50%, 75%, 80% 90% or 95% of the Gly-Xaa-Yaa occurrences, or in each of the Gly-Xaa-Yaa occurrences. In some cases, a collagen domain comprises the sequence Gly-Xaa-Pro repeated from 10 to 40 times. A collagen oligomerization peptide can comprise the following aa sequence: VTAFSNMDDMLQKAHLVIEGTFIYLRDSTEFFIRVRDGW-KKLQLGELIPIPADSPPPPALSSNP (SEQ ID NO:105).

[0304] b. Immunoglobulin Fc Scaffold Polypeptides

[0305] (i) Non-Interspecific Immunoglobulin Fc Scaffold Polypeptides

[0306] The scaffold polypeptide sequences of a T-Cell-MP or its corresponding T-Cell-MP-epitope conjugate may comprise a Fc polypeptide. The Fc polypeptide of a T-Cell-MP or T-Cell-MP-epitope conjugate can be, for example, from an IgA, IgD, IgE, IgG, or IgM, any of which may be a human polypeptide sequence, a humanized polypeptide sequence, a Fc region polypeptide of a synthetic heavy chain constant region, or a consensus heavy chain constant region. In embodiments, the Fc polypeptide can be from a human IgG1 Fc, a human IgG2 Fc, a human IgG3 Fc, a human IgG4 Fc, a human IgA Fc, a human IgD Fc, a human IgE Fc, a human IgM Fc, etc. In some cases, the Fc polypeptide comprises an aa sequence having at least about 70% (e.g., at least about 75%, 80%, 85%, 90%, 95%, 98%, or 99%), or 100% aa sequence identity to at least 125 contiguous aas (e.g., at least 150, at least 175, at least 200, or at least 210 contiguous aas), or all aas of an aa sequence of a Fc region depicted in FIGS. 2A-2H. Such immunoglobulin sequences can interact forming a duplex or higher order structure from T-Cell-MP molecules. In some instances, the Fc scaffold polypeptide sequences include naturally occurring cysteine residues (or non-naturally occurring cysteine residues provided by protein engineering) that are capable of forming interchain disulfide bonds covalently linking two T-Cell-MP polypeptides together. Unless stated otherwise, the Fc polypeptides used in the T-Cell-MPs and their epitope conjugates do not comprise a transmembrane anchoring domain or a portion thereof sufficient to anchor the T-Cell-MP to a cell membrane.

[0307] Most immunoglobulin Fc scaffold polypeptides, particularly those comprising only or largely wt. sequences, may spontaneously link together via disulfide bonds to form homodimers resulting in duplex T-Cell-MPs. In the case of IgM heavy chain constant regions, in the presences of a J-chains, higher order complexes may be formed. Scaffold polypeptides may comprise an aa sequence having 100% aa sequence identity to the wt. human IgG1 Fc polypeptide depicted in FIG. 2D. A scaffold polypeptide may comprise an aa sequence having at least about 70% (e.g., at least about 80%, 90%, 95%, 98%, or 99%) or 100% aa sequence identity to at least 125 contiguous aas (e.g., at least 150, at least 175, at least 200, or at least 210 contiguous aas), or all aas, of the wt. human IgG1 Fc polypeptide depicted in FIG. 2D. Such scaffold sequences may include a substitution of N297 (N77 as numbered in FIG. 2D, SEQ ID NO:4) with an aa other than asparagine. In one case, N297 is substituted by alanine, (N297A). Substitutions at N297 lead to the removal of carbohydrate modifications and result antibody sequences with reduced complement component 1q (“C1q”) binding compared to the wt. protein, and accordingly a reduction in complement-dependent cytotoxicity (CDC). K322 (e.g., K322A) substitutions shows a substantial reduction in reduction in FcγR binding affinity and ADCC, with the C1q binding and CDC functions substantially or completely eliminated. Hezareh et al., (2001) J. Virol. 75:12161-168.

[0308] Amino acid L234 and other aas in the lower hinge region (e.g., aas 234 to 239, such as L235, G236, G237, P238, 5239) which correspond to aas 14-19 of SEQ ID NO:8) of IgG are involved in binding to the Fc gamma receptor (FcγR), and accordingly, mutations at that location reduce binding to the receptor (relative to the wt. protein) and resulting in a reduction in antibody-dependent cellular cytotoxicity (ADCC). Hezareh et al., (2001) have demonstrated that the double mutant (L234A, L235A) does not effectively bind either FcγR or C1q, and both ADCC and CDC functions were substantially or completely abolished. A scaffold polypeptide with a substitution in the lower hinge region may comprise an aa sequence having at least about 70% (e.g., at least about 80%, 90%, 95%, 98%, or 99%) aa sequence identity to at least 125 contiguous aas (e.g., at least 150, at least 175, at least 200, or at least 210 contiguous aas), or all aas, of the wt. human IgG1 Fc polypeptide depicted in FIG. 2D, that includes a substitution of L234 (L14 of the aa sequence depicted in FIG. 2D) with an aa other than leucine.

[0309] A scaffold polypeptide with a substitution in the lower hinge region may comprise an aa sequence having at least about 70% (e.g., at least about 80%, 90%, 95%, 98%, or 99%) aa sequence identity to at least 125 contiguous aas (e.g., at least 150, at least 175, at least 200, or at least 210 contiguous aas), or all aas, of the wt. human IgG1 Fc polypeptide depicted in FIG. 2D, that includes a substitution of L235 (L15 of the aa sequence depicted in FIG. 22D) with an aa other than leucine. In some cases, the scaffold polypeptide present in a T-Cell-MP with substitutions in the lower hinge region includes L234A and L235A (“LALA”) substitutions (the positions corresponding to positions 14 and 15 of the wt. aa sequence depicted in FIG. 2D; see, e.g., SEQ ID NO:8).

[0310] A scaffold polypeptide with a substitution in the lower hinge region may comprise an aa sequence having at least about 70% (e.g., at least about 80%, 90%, 95%, 98%, or 99%) aa sequence identity to at least 125 contiguous aas (e.g., at least 150, at least 175, at least 200, or at least 210 contiguous aas), or all aas of the wt. human IgG1 Fc polypeptide depicted in FIG. 2D, that includes a substitution of P331 (P111 of the aa sequence depicted in FIG. 2D) with an aa other than proline. Substitutions at P331, like those at N297, lead to reduced binding to C1q relative to the wt. protein, and thus a reduction in complement dependent cytotoxicity. In one embodiment, the substitution is a P331S substitution. In another embodiment, the substitution is a P331A substitution.

[0311] A scaffold polypeptide may comprise an aa sequence having at least about 70% (e.g., at least about 80%, 90%, 95%, 98%, or 99%) aa sequence identity to at least 125 contiguous aas (e.g., at least 150, at least 175, at least 200, or at least 210 contiguous aas), or all aas, of the wt. human IgG1 Fc polypeptide depicted in FIG. 2D, and include substitutions of D270, K322, and/or P329 (corresponding to D50, K102, and P109 of SEQ ID NO:4 in FIG. 2D) that reduce binding to C1q protein relative to the wt. proteins.

[0312] A scaffold polypeptide may comprise an aa sequence having at least about 70% (e.g., at least about 80%, 90%, 95%, 98%, or 99%) aa sequence identity to at least 125 contiguous aas (e.g., at least 150, at least 175, at least 200, or at least 210 contiguous aas), or all aas, of the wt. human IgG1 Fc polypeptide depicted in FIG. 2D, including substitutions at L234 and/or L235 (L14 and/or L15 of the aa sequence depicted in FIG. 2D) with aas other than leucine (such as L234A and L235A substitutions), and a substitution of P331 (P111 of the aa sequence depicted in FIG. 2D) with an aa other than proline such as P331S. In one instance, a scaffold polypeptide present in a T-Cell-MP comprises the “Triple Mutant” aa sequence (SEQ ID NO:6) depicted in FIG. 2D (human IgG1 Fc) having L234F, L235E, and P331S substitutions (corresponding to aa positions 14, 15, and 111 of the aa sequence depicted in FIG. 2D).

[0313] The scaffold Fc polypeptide of a T-Cell-MP may comprise an aa sequence having at least about 70% (e.g., at least about 75%, 80%, 85%, 90%, 95%, 98%, or 99%), or 100% aa, sequence identity to at least 125 contiguous aas (e.g., at least 150, at least 175, at least 200, or at least 210 contiguous aas), or all aas, of a human IgG2 Fc polypeptide depicted in FIG. 2E. The scaffold Fc polypeptide of a T-Cell-MP may comprise an aa sequence having at least about 70% (e.g., at least about 75%, 80%, 85%, 90%, 95%, 98%, or 99%), or 100% aa, sequence identity to at least 125 contiguous aas (e.g., at least 150, at least 175, at least 200, or at least 210 contiguous aas), or all aas, of a human IgG3 Fc polypeptide depicted in FIG. 2F. The scaffold Fc polypeptide of a T-Cell-MP may comprise an aa sequence having at least about 70% (e.g., at least about 75%, 80%, 85%, 90%, 95%, 98%, or 99%), or 100% aa, sequence identity to at least 125 contiguous aas (e.g., at least 150, at least 175, at least 200, or at least 210 contiguous aas), or all aas, of a human IgG4 Fc polypeptide depicted in FIG. 2G. The scaffold Fc polypeptide of a T-Cell-MP may comprise an aa sequence having at least about 70% (e.g., at least about 75%, 80%, 85%, 90%, 95%, 98%, or 99%), or 100% aa sequence identity to at least 125 contiguous aas (e.g., at least 150, at least 175, at least 200, or at least 210 contiguous aas e.g., aas 99 to 327 or 111 to 327), or all of the GenBank P01861 human IgG4 Fc polypeptide depicted in FIG. 2G.

[0314] The scaffold Fc polypeptide of a T-Cell-MP may comprise IgM heavy chain constant regions (see e.g., FIG. 2H), which forms hexamer, or pentamers (particularly when combined with a mature j-chain peptide lacking a signal sequence such as that provided in FIG. 2I.

[0315] (ii) Interspecific Immunoglobulin Fc Scaffold Polypeptides

[0316] Where an asymmetric pairing between two T-Cell-MP molecules is desired (e.g., to produce a duplex T-Cell-MP with different MODs), a scaffold polypeptide present in a T-Cell-MP may comprise, consist essentially of, or consist of an interspecific Ig Fc polypeptides) sequence variants. Such interspecific polypeptide sequences include, but are not limited to, knob-in-hole without (KiH) or with (KiHs-s) a stabilizing disulfide bond, HA-TF, ZW-1, 7.8.60, DD-KK, EW-RVT, EW-RVTs-s, and A107 sequences. One interspecific binding pair comprises a T366Y and Y407T mutant pair in the CH3 domain interface of IgG1, or the corresponding residues of other immunoglobulins. See Ridgway et al., Protein Engineering 9:7, 617-621 (1996). A second interspecific binding pair involves the formation of a knob by a T366W substitution, and a hole by the triple substitutions T366S, L368A and Y407V on the complementary Ig Fc sequence. See Xu et al. mAbs 7:1, 231-242 (2015). Another interspecific binding pair has a first Ig Fc polypeptide with Y349C, T366S, L368A, and Y407V substitutions and a second Ig Fc polypeptide with S354C, and T366W substitutions (disulfide bonds can form between the Y349C and the S354C). See e.g., Brinkmann and Konthermann, mAbs 9:2, 182-212 (2015). Ig Fc polypeptide sequences, either with or without knob-in-hole modifications, can be stabilized by the formation of disulfide bonds between the Ig Fc polypeptides (e.g., the hinge region disulfide bonds). Several interspecific binding sequences based upon immunoglobulin sequences are summarized in the table that follows, with cross reference to the numbering of the aa positions as they appear in the wt. IgG1 sequence (SEQ ID NO:4) set forth in FIG. 2D shown in brackets “{ }”.

TABLE 1
Interspecific immunoglobulin sequences and their cognate counterpart interspecific sequences

| | Substitutions in the first | Substitutions in the second | |
|---|---|---|---|
| Interspecific | interspecific polypeptide | (counterpart) interspecific | |
| Pair Name | sequence | polypeptide sequence | Comments |
| KiH | T366W | T366S/L368A/Y407V | Hydrophobic/steric |
| | {T146W} | {T146S/L148A/Y187V} | complementarity |
| KiHs-s | T366W/S354C* | T366S/L368A/Y407V/Y349C | KiH + inter-CH3 |
| | {T146W/S134C*} | {T146S/L148A/Y187V/Y129C} | domain S—S bond |
| HA-TF | S364H/F405A | Y349T/T394F | Hydrophobic/steric |
| | {S144H/F185A} | {Y129T/T174F} | complementarity |
| ZW1 | T350V/L351Y/F405A/Y407V | T350V/T366L/K392L/T394W | Hydrophobic/steric |
| | {T130V/L131Y/F185A/Y187V} | {T130V/T146L/K172L/T174W} | complementarity |
| 7.8.60 | K360D/D399M/Y407A | E345R/Q347R/T366V/K409V | Hydrophobic/steric |
| | {K140D/D179M/Y187A} | {E125R/Q127R/T146V/K189V} | complementarity + |
| | | | electrostatic |
| | | | complementarity |
| DD-KK | K409D/K392D | D399K/E356K | Electrostatic |
| | {K189D/K172D} | {D179K/E136K} | complementarity |
| EW-RVT | K360E/K409W | Q347R/D399V/F405T | Hydrophobic/steric |
| | {K140E/K189W} | {Q127R/D179V/F185T} | complementarity & |
| | | | long-range electro- |
| | | | static interaction |
| EW-RVTs-s | K360E/K409W/Y349C* | Q347R/D399V/F405T/S354C | EW-RVT + inter- |
| | {K140E/K189W/Y129C*} | {Q127R/D179V/F185T/S134C} | CH3 domain SS |
| | | | bond |
| A107 | K370E/K409W | E357N/D399V/F405T | Hydrophobic/steric |
| | {K150E/K189W} | {E137N/D179V/F185T} | complementarity + |
| | | | hydrogen bonding |
| | | | complementarity |

Table 1 is modified from Ha et al., Frontiers in Immunol. 7: 1-16 (2016).
*aa forms a stabilizing disulfide bond.

[0317] In addition to the interspecific pairs of sequences in Table 1, scaffold polypeptides may include interspecific “SEED” sequences having 45 residues derived from IgA in an IgG1 CH3 domain of the interspecific sequence, and 57 residues derived from IgG1 in the IgA CH3 in its counterpart interspecific sequence. See Ha et al., Frontiers in Immunol. 7:1-16 (2016).

[0318] Interspecific immunoglobulin sequences my include substitutions described above for non-interspecific immunoglobulin sequences that inhibit binding either or both of the FcγR or C1q, and reduce or abolish ADCC and CDC function.

[0319] In an embodiment, a scaffold polypeptide found in a T-Cell-MP may comprise an interspecific binding sequence or its counterpart interspecific binding sequence selected from the group consisting of: knob-in-hole (KiH); knob-in-hole with a stabilizing disulfide (KiHs-s); HA-TF; ZW-1; 7.8.60; DD-KK; EW-RVT; EW-RVTs-s; A107; or SEED sequences.

[0320] In an embodiment, a T-Cell-MP comprises a scaffold polypeptide comprising an IgG1 sequence with a T146W KiH sequence substitution, and its counterpart interspecific binding partner polypeptide comprises an IgG1 sequence having T146W, L148A, and Y187V KiH sequence substitutions, where the scaffold polypeptides comprises a sequence having at least 80%, at least 90%, at least 95%, or at least 97% sequence identity to at least 100 (e.g., at least 125, 150, 170, 180, 190, 200, 210, 220, or all 227) contiguous aas of the wt. IgG1 of FIG. 2D. Scaffold polypeptides optionally comprise substitutions at one of more of: L234 and L235 (e.g., L234A/L235A “LALA” or L234F/L235E); N297 (e.g., N297A); P331 (e.g. P331S); L351 (e.g., L351K); T366 (e.g., T366S); P395 (e.g., P395V); F405 (e.g., F405R); Y407 (e.g., Y407A); and K409 (e.g., K409Y). Those substitutions appear at: L14 and L15 (e.g., L14A/L15A “LALA” or L14F/L15E); N77 (e.g., N77A); P111 (e.g. P111S) L131 (e.g., L131K); T146 (e.g., T146S); P175 (e.g., P175V); F185 (e.g., F185R); Y187 (e.g., Y187A); and K189 (e.g., K189Y) in the wt. IgG1 sequence of FIG. 2D.

[0321] In an embodiment, a T-Cell-MP or duplex T-Cell-MP comprises a scaffold polypeptide comprising an IgG1 sequence with a T146W KiH sequence substitution, and its counterpart interspecific binding partner polypeptide comprises an IgG1 sequence having T146S, L148A, and Y187V KiH sequence substitutions, where the scaffold polypeptides comprise a sequence having at least 80%, at least 90%, at least 95%, or at least 97% sequence identity to at least 100 (e.g., at least 125, 150, 170, 180, 190, 200, 210, 220, or all 227) contiguous aas of the wt. IgG1 of FIG. 2D; where one or both (in the case of duplex T-Cell-MP) scaffold polypeptide sequence(s) may comprise additional substitutions such as L14 and/or L15 substitutions (e.g., “LALA” substitutions L234A and L235A), and/or N77 (N297 e.g., N297A or N297G).

[0322] In an embodiment, a T-Cell-MP or duplex T-Cell-MP comprises a scaffold polypeptide comprising an IgG1 sequence with a T146W and S134C KiHs-s substitutions, and its counterpart interspecific binding partner polypeptide comprises an IgG1 sequence having T146S, L148A, Y187V and Y129C KiHs-s substitutions, where the scaffold polypeptides comprise a sequence having at least 80%, at least 90%, at least 95%, or at least 97% sequence identity to at least 100 (e.g., at least 125, 150, 170, 180, 190, 200, 210, 220, or all 227) contiguous aas of the wt. IgG1 of FIG. 2D; where one or both (in the case of duplex T-Cell-MP) scaffold polypeptide sequence(s) sequences may comprise additional substitutions such as L14 and/or L15 substitutions (e.g., “LALA” substitutions L234A and L235A), and/or N77 (N297 e.g., N297A or N297G).

[0323] In an embodiment, a T-Cell-MP comprises a scaffold polypeptide comprising an IgG1 sequence with a S144H and F185A HA-TF substitutions, and its counterpart interspecific binding partner polypeptide comprises an IgG1 sequence having Y129T and T174F HA-TF substitutions, where the scaffold polypeptides comprise a sequence having at least 80%, at least 90%, at least 95%, or at least 97% sequence identity to at least 100 (e.g., at least 125, 150, 170, 180, 190, 200, 210, 220, or all 227) contiguous aas of the wt. IgG1 of FIG. 2D; where one or both (in the case of duplex T-Cell-MP) scaffold polypeptide sequence(s) may comprise additional substitutions such as L14 and/or L15 substitutions (e.g., “LALA” substitutions L234A and L235A), and/or N77 (N297 e.g., N297A or N297G).

[0324] In an embodiment, a T-Cell-MP or duplex T-Cell-MP comprises a scaffold polypeptide comprising an IgG1 sequence with a T130V, L131Y, F185A, and Y187V ZW1 substitutions, and its counterpart interspecific binding partner polypeptide comprises an IgG1 sequence having T130V, T146L, K172L, and T174W ZW1 substitutions, where the scaffold polypeptides comprise a sequence having at least 80%, at least 90%, at least 95%, or at least 97% sequence identity to at least 100 (e.g., at least 125, 150, 170, 180, 190, 200, 210, 220, or all 227) contiguous aas of the wt. IgG1 of FIG. 2D; where one or both (in the case of duplex T-Cell-MP) scaffold polypeptide sequence(s) may comprise additional substitutions such as L14 and/or L15 substitutions (e.g., “LALA” substitutions L234A and L235A), and/or N77 (N297 e.g., N297A or N297G).

[0325] In an embodiment, a T-Cell-MP or duplex T-Cell-MP comprises a scaffold polypeptide comprising an IgG1 sequence with a K140D, D179M, and Y187A 7.8.60 substitutions, and its counterpart interspecific binding partner polypeptide comprises an IgG1 sequence having T130V E125R, Q127R, T146V, and K189V 7.8.60 substitutions, where the scaffold polypeptides comprise a sequence having at least 80%, at least 90%, at least 95%, or at least 97% sequence identity to at least 100 (e.g., at least 125, 150, 170, 180, 190, 200, 210, 220, or all 227) contiguous aas of the wt. IgG1 of FIG. 2D; where one or both (in the case of duplex T-Cell-MP) scaffold polypeptide sequence(s) may comprise additional substitutions such as L14 and/or L15 substitutions (e.g., “LALA” substitutions L234A and L235A), and/or N77 (N297 e.g., N297A or N297G).

[0326] In an embodiment, a T-Cell-MP or duplex T-Cell-MP comprises a scaffold polypeptide comprising an IgG1 sequence with a K189D, and K172D DD-KK substitutions, and its counterpart interspecific binding partner polypeptide comprises an IgG1 sequence having T130V D179K and E136K DD-KK substitutions, where the scaffold polypeptides comprise a sequence having at least 80%, at least 90%, at least 95%, or at least 97% sequence identity to at least 100 (e.g., at least 125, 150, 170, 180, 190, 200, 210, 220, or all 227) contiguous aas of the wt. IgG1 of FIG. 2D; where one or both (in the case of duplex T-Cell-MP) scaffold polypeptide sequence(s) may comprise additional substitutions such as L14 and/or L15 substitutions (e.g., “LALA” substitutions L234A and L235A), and/or N77 (N297 e.g., N297A or N297G).

[0327] In an embodiment, a T-Cell-MP or duplex T-Cell-MP comprises a scaffold polypeptide comprising an IgG1 sequence with a K140E and K189W EW-RVT substitutions, its counterpart interspecific binding partner polypeptide comprises an IgG1 sequence having T130V Q127R, D179V, and F185T EW-RVT substitutions, where the scaffold polypeptides comprise a sequence having at least 80%, at least 90%, at least 95%, or at least 97% sequence identity to at least 100 (e.g., at least 125, 150, 170, 180, 190, 200, 210, 220, or all 227) contiguous aas of the wt. IgG1 of FIG. 2D; where one or both (in the case of duplex T-Cell-MP) scaffold polypeptide sequence(s) may comprise additional substitutions such as L14 and/or L15 substitutions (e.g., “LALA” substitutions L234A and L235A), and/or N77 (N297 e.g., N297A or N297G).

[0328] In an embodiment, a T-Cell-MP or duplex T-Cell-MP comprises a scaffold polypeptide comprising an IgG1 sequence with a K140E, K189W, and Y129C EW-RVTs-s substitutions, its counterpart interspecific binding partner polypeptide comprises an IgG1 sequence having T130V Q127R, D179V, F185T, and S134C EW-RVTs-s substitutions, where the scaffold polypeptides comprise a sequence having at least 80%, at least 90%, at least 95%, or at least 97% sequence identity to at least 100 (e.g., at least 125, 150, 170, 180, 190, 200, 210, 220, or all 227) contiguous aas of the wt. IgG1 of FIG. 2D; where one or both (in the case of duplex T-Cell-MP) scaffold polypeptide sequence(s) may comprise additional substitutions such as L14 and/or L15 substitutions (e.g., “LALA” substitutions L234A and L235A), and/or N77 (N297 e.g., N297A or N297G).

[0329] In an embodiment, a T-Cell-MP or duplex T-Cell-MP comprises a scaffold polypeptide comprising an IgG1 sequence with a K150E and K189W A107 substitutions, its counterpart interspecific binding partner polypeptide comprises an IgG1 sequence having T130V E137N, D179V, and F185T A107 substitutions, where the scaffold polypeptides comprise a sequence having at least 80%, at least 90%, at least 95%, or at least 97% sequence identity to at least 100 (e.g., at least 125, 150, 170, 180, 190, 200, 210, 220, or all 227) contiguous aas of the wt. IgG1 of FIG. 2D; where one or both (in the case of duplex T-Cell-MP) scaffold polypeptide sequence(s) may comprise additional substitutions such as L14 and/or L15 substitutions (e.g., “LALA” substitutions L234A and L235A), and/or N77 (N297 e.g., N297A or N297G).

[0330] As an alternative to the use of immunoglobulin CH2 and CH3 heavy chain constant regions as scaffold sequences, immunoglobulin light chain constant regions (See FIG. 2K) can be paired with Ig CH1 sequences (See, e.g., FIG. 2J) as interspecific scaffold sequences.

[0331] In an embodiment, a T-Cell-MP scaffold polypeptide comprises an Ig CH1 domain (e.g., the polypeptide of FIG. 2J), and the sequence with which it will form a complex (its counterpart binding partner) comprises is an Ig κ chain constant region sequence, where the scaffold polypeptide comprise a sequence having at least 80%, 85%, 90%, 95%, 98%, 99%, or 100% sequence identity to at least 70, at least 80, at least 90, at least 100, or at least 110 contiguous aas of SEQ ID NOs: 16 and/or 17 resp. See FIG. 2K. The Ig CH1 and Ig κ sequences may be modified to increase their affinity for each other, and accordingly the stability of any heterodimer formed utilizing them. Among the substitutions that increase the stability of CH1-Ig κ heterodimers are those identified as the MD13 combination in Chen et al., MAbs, 8(4):761-774 (2016). In the MD13 combination two substitutions are introduced into to each of the IgCH1 and Ig κ sequences. The Ig CH1 sequence is modified to contain S64E and S66V substitutions (570E and S72V of the sequence shown in FIG. 2J). The Ig κ sequence is modified to contain S69L and T715 substitutions (S68L and T705 of the sequence shown in FIG. 2K).

[0332] In another embodiment, a scaffold polypeptide of a T-Cell-MP comprises an Ig CH1 domain (e.g., the polypeptide of FIG. 2J SEQ ID NO:15), and its counterpart sequence comprises an Ig chain constant region sequence such as is shown in FIG. 2K (SEQ ID NO:17), where the scaffold polypeptide comprises a sequence having at least 80%, 85%, 90%, 95%, 98%, 99%, or 100% sequence identity to at least 70 (e.g., at least 80, at least 90, or at least 100) contiguous aas of the sequences shown in FIG. 2K.

[0333] c. Effects on Stability and Half-Life

[0334] Suitable scaffold polypeptides (e.g., those with an Ig Fc scaffold sequence) will in some cases extend the half-life of T-Cell-MP polypeptides and their higher order complexes. In some cases, a suitable scaffold polypeptide increases the in vivo half-life (e.g., the serum half-life) of the T-Cell-MP or duplex T-Cell-MP, compared to a control T-Cell-MP or duplex T-Cell-MP lacking the scaffold polypeptide or comprising a control scaffold polypeptide. For example, in some cases, a scaffold polypeptide increases the in vivo half-life (e.g. serum half-life) of a conjugated or unconjugated T-Cell-MP or duplex T-Cell-MP, compared to an otherwise identical control lacking the scaffold polypeptide, or having a control scaffold polypeptide, by at least about 10%, at least about 20%, at least about 30%, at least about 50%, at least about 2-fold, at least about 5-fold, at least about 10-fold, at least about 25-fold, at least about 50-fold, at least about 100-fold, or more than 100-fold.

[0335] 5 Immunomodulatory Polypeptides (“MODs”)

[0336] MODs that are suitable for inclusion in a T-Cell-MP of the present disclosure include, but are not limited to, wt. and variants of the following immunomodulatory polypeptides IL-1, IL-2, IL-4, IL-6, IL-7, IL-10, IL-12, IL-15, IL-17, IL-21, IL-23, CD7, CD30L, CD40, CD70, CD80, (B7-1), CD83, CD86 (B7-2), HVEM (CD270), ILT3 (immunoglobulin-like transcript 3), ILT4(immunoglobulin-like transcript 4), Fas ligand (FasL), ICAM (intercellular adhesion molecule), ICOS-L (inducible costimulatory ligand), JAG1 (CD339), lymphotoxin beta receptor, 3/TR6, OX40L (CD252), PD-L1, PD-L2, TGF-β1, TGF-β2, TGF-β3, 4-1BBL, and fragments of any thereof, such as ectodomain fragments, capable of engaging and signaling through their cognate receptor). Unless stated otherwise, it is understood that the MODs employed in the T-Cell-MPs of this disclosure may be either wt. and/or variants of wt. immunomodulatory polypeptides, e.g., a variant that selectively binds to a particular Co-MODs and/or has reduced affinity to a particular Co-MOD. Some MOD polypeptides suitable for inclusion in a T-Cell-MP of the present disclosure and their Co-MOD or Co-MODs (“co-immunomodulatory polypeptides” or cognate costimulatory receptors) include polypeptide sequences with T cell modulatory activity from the protein pairs recited in the following table:

[0337] Exemplary Pairs of MODs and Co-MODs

| | |
|---|---|
| a) | 4-1BBL (MOD) and 4-1BB (Co-MOD); |
| b) | PD-L1 (MOD) and PD1 (Co-MOD); |
| c) | IL-2 (MOD) and IL-2 receptor (Co-MOD); |
| d) | CD80 (MOD) and CD28 (Co-MOD); |
| e) | CD86 (MOD) and CD28 (Co-MOD); |
| f) | OX40L (CD252) (MOD) and OX40 (CD134) (Co-MOD); |
| g) | Fas ligand (MOD) and Fas (Co-MOD); |
| h) | ICOS-L (MOD) and ICOS (Co-MOD); |
| i) | ICAM (MOD) and LFA-1 (Co-MOD); |
| j) | CD30L (MOD) and CD30 (Co-MOD); |
| k) | CD40 (MOD) and CD40L (Co-MOD); |
| l) | CD83 (MOD) and CD83L (Co-MOD); |
| m) | HVEM (CD270) (MOD) and CD160 (Co-MOD); |
| n) | JAG1 (CD339) (MOD) and Notch (Co-MOD); |
| o) | JAG1 (CD339) (MOD) and CD46 (Co-MOD); |
| p) | CD70 (MOD) and CD27 (Co-MOD); |
| q) | CD80 (MOD) and CTLA4 (Co-MOD); |
| r) | CD86 (MOD) and CTLA4 (Co-MOD); |
| s) | PD-L1(MOD) and CD-80 (Co-MOD); and |
| t) | TGF-β1, TGF-β2, and/or TGF-β3 (MODs) and TGF-β Receptor |
| | (e.g., TGFBR1 and/or TGFBR2) (Co-MOD) |

[0338] In some cases, the MOD is selected from a wt. or variant of an IL-2 polypeptide, a 4-1BBL polypeptide, a B7-1 polypeptide; a B7-2 polypeptide, an ICOS-L polypeptide, an OX-40L polypeptide, a CD80 polypeptide, a CD86 polypeptide, a PD-L1 polypeptide, a FasL polypeptide, a TGFβ polypeptide, and a PD-L2 polypeptide. In some cases, the T-Cell-MP or duplex T-Cell-MP comprises two different MODs, such as an IL-2 MOD or IL-2 variant MOD polypeptide and either a wt. or variant of a CD80 or CD86 MOD polypeptide. In another instance, the T-Cell-MP or duplex T-Cell-MP comprises an IL-2 MOD or IL-2 variant MOD polypeptide and a wt. or variant of a PD-L1 MOD polypeptide. In some case MODs, which may be the same or different, are present in a T-Cell-MP or duplex T-Cell-MP in tandem. When MODs are presented in tandem, their sequences are immediately adjacent to each other on a single polypeptide, either without any intervening sequence or separated by only a linker polypeptide (e.g., no MHC sequences or epitope sequences intervene). The MOD polypeptide may comprise all or part of the extracellular portion of a full-length MOD. Thus, for example, the MOD can in some cases exclude one or more of a signal peptide, a transmembrane domain, and an intracellular domain normally found in a naturally-occurring MOD. Unless stated otherwise, a MOD present in a T-Cell-MP or duplex T-Cell-MP does not comprise the signal peptide, intracellular domain, or a sufficient portion of the transmembrane domain to anchor a substantial amount (e.g., more than 5% or 10%) of a T-Cell-MP or duplex T-Cell-MP into a mammalian cell membrane.

[0339] In some cases, a MOD suitable for inclusion in a T-Cell-MP comprises all or a portion of (e.g., an extracellular portion of) the aa sequence of a naturally occurring MOD. In other instances, a MOD suitable for inclusion in a T-Cell-MP is a variant MOD that comprises at least one aa substitution compared to the aa sequence of a naturally occurring MOD. In some instances, a variant MOD exhibits a binding affinity for a Co-MOD that is lower than the affinity of a corresponding naturally-occurring MOD (e.g., a MOD not comprising the aa substitution(s) present in the variant) for the Co-MOD. Suitable variations in MOD polypeptide sequence that alter affinity may be identified by scanning (making aa substitution e.g., alanine substitutions or “alanine scanning” or charged residue changes) along the length of a peptide and testing its affinity. Once key aa positions altering affinity are identified those positions can be subject to a vertical scan in which the effect of one or more aa substitutions other than alanine are tested. The affinity may be determined by BLI as described below

[0340] a. MODS and Variant MODs with Reduced Affinity

[0341] Suitable immunomodulatory domains that exhibit reduced affinity for a co-immunomodulatory domain can have from 1 aa to 20 aa differences from a wt. immunomodulatory domain. For example, in some cases, a variant MOD present in a T-Cell-MP differs in aa sequence by 1 aa to 10 aa, or by 11 aa to 20 aa from a corresponding wt. MOD. A variant MOD present in a T-Cell-MP may include a single aa substitution compared to a corresponding reference (e.g., wt.) MOD. A variant MOD present in a T-Cell-MP may include 2 aa substitutions compared to a corresponding reference (e.g., wt.) MOD. A variant MOD present in a T-Cell-MP may include 3 aa substitutions compared to a corresponding reference (e.g., wt.) MOD. A variant MOD present in a T-Cell-MP may include 4 aa substitutions compared to a corresponding reference (e.g., wt.) MOD. A variant MOD present in a T-Cell-MP may include 5 aa substitutions compared to a corresponding reference (e.g., wt.) MOD. A variant MOD present in a T-Cell-MP may include 6 aa or 7 aa substitutions compared to a corresponding reference (e.g., wt.) MOD. A variant MOD present in a T-Cell-MP may include 8 aa, 9 aa, or 10 aa substitutions compared to a corresponding reference (e.g., wt.) MOD. A variant MOD present in a T-Cell-MP may include 11, 12, 13, 14, or 15 aa substitutions compared to a corresponding reference (e.g., wt.) MOD. A variant MOD present in a T-Cell-MP may include 16, 17, 18, 19, or 20 aa substitutions compared to a corresponding reference (e.g., wt.) MOD.

[0342] As discussed above, a variant MOD suitable for inclusion in a T-Cell-MP of the present disclosure may exhibit reduced affinity for a cognate Co-MOD, compared to the affinity of a corresponding wt. MOD for the cognate Co-MOD. In some cases, a variant MOD present in a T-Cell-MP has a binding affinity for a cognate Co-MOD that is from 100 nM to 100 μM. For example, in some cases, a variant MOD present in a T-Cell-MP has a binding affinity for a cognate Co-MOD that is from about 100 nM to about 200 nM, from about 200 nM to about 300 nM, from about 300 nM to about 400 nM, from about 400 nM to about 500 nM, from about 500 nM to about 600 nM, from about 600 nM to about 700 nM, from about 700 nM to about 800 nM, from about 800 nM to about 900 nM, from about 900 nM to about 1 μM, from about 1 μM to about 5 μM, from about 5 μM to about 10 μM, from about 10 μM to about 20 μM, from about 20 μM to about 30 μM, from about 30 μM to about 50 μM, from about 50 μM to about 75 μM, or from about 75 μM to about 100 μM.

[0343] Alternatively, or additionally to reduced affinity binding, the MOD may be a variant that exhibits selective binding to a Co-MOD. In one aspect, where a MOD can bind to more than one Co-MOD, a variant may be chosen that selectively binds to at least one Co-MOD. For example, wt. PD-L1 binds to both PD-1 and CD80 (also known as B7-1). In such case, a variant PD-L1 MOD may be chosen that selectively (preferentially) binds either to PD-1 or CD80. Likewise, where a wt. MOD may bind to multiple polypeptides within a Co-MOD, a variant may be chosen to selectively bind to only the desired polypeptides with the Co-MOD. For example, IL-2 binds to the alpha, beta and gamma chains of IL-2R. A variant of IL-2 can be chosen that either binds with reduced affinity, or does not bind, to one of the polypeptides, e.g., the alpha chain of IL-2R, or even to two of the chains.

[0344] (i) Determining Binding Affinity

[0345] Binding affinity between a MOD and its cognate Co-MOD can be determined by bio-layer interferometry (BLI) using purified MOD and purified cognate Co-MOD. Binding affinity between a T-Cell-MP and its cognate Co-MOD can also be determined by BLI using purified T-Cell-MP and the cognate Co-MOD. BLI methods are well known to those skilled in the art. See, e.g., Lad et al. (2015) J. Biomol. Screen. 20(4):498-507; and Shah and Duncan (2014) J. Vis. Exp. 18:e51383. The specific and relative binding affinities described in this disclosure between a MOD and its cognate Co-MOD, or between a T-Cell-MP having a MOD and its cognate Co-MOD, can be determined using the following procedures.

[0346] To determine binding affinity between a T-Cell-MP and its cognate Co-MOD, a BLI assay can be carried out using an Octet RED 96 (Pal FortéBio) instrument, or a similar instrument, as follows. A T-Cell-MP (e.g., a control T-Cell-MP comprising a wt. MOD)) is immobilized onto an insoluble support (a “biosensor”). The immobilized T-Cell-MP is the “target” Immobilization can be effected by immobilizing a capture antibody onto the insoluble support, where the capture antibody immobilizes the T-Cell-MP. For example, immobilization can be effected by immobilizing anti-Fc (e.g., anti-human IgG Fc) antibodies onto the insoluble support, where the immobilized anti-Fc antibodies bind to and immobilize the T-Cell-MP (where the T-Cell-MP comprises an Ig Fc polypeptide). A Co-MOD is applied, at several different concentrations, to the immobilized T-Cell-MP, and the instrument's response recorded. Assays are conducted in a liquid medium comprising 25 mM HEPES pH 6.8, 5% poly(ethylene glycol) 6000, 50 mM KCl, 0.1% bovine serum albumin, and 0.02% Tween 20 nonionic detergent. Binding of the Co-MOD to the immobilized T-Cell-MP is conducted at 30° C. As a positive control for binding affinity, an anti-MHC Class I monoclonal antibody can be used depending on the class of the MHC polypeptides in the T-Cell-MP. For example, anti-HLA Class I monoclonal antibody (mAb) W6/32 (American Type Culture Collection No. HB-95; Parham et al. (1979) J. Immunol. 123:342), which has a KD of 7 nM, or an anti-HLD-DR3 monoclonal antibody such as the 16-23 antibody (Sigma; also referred to as “16.23”; see, e.g., Pious et al. (1985) J. Exp. Med. 162:1193; Mellins et al. (1991) J. Exp. Med. 174:1607; ECACC hybridoma collection 16-23, ECACC 99043001) can be used as a positive control for binding affinity. A standard curve can be generated using serial dilutions of the anti-MHC Class I monoclonal antibody. The Co-MOD, or the anti-MHC mAb, is the “analyte.” BLI analyzes the interference pattern of white light reflected from two surfaces: i) the immobilized polypeptide (“target”); and ii) an internal reference layer. A change in the number of molecules (“analyte”; e.g., Co-MOD; anti-HLA antibody) bound to the biosensor tip causes a shift in the interference pattern; this shift in interference pattern can be measured in real time. The two kinetic terms that describe the affinity of the target/analyte interaction are the association constant (kₐ) and dissociation constant (k_{d}). The ratio of these two terms (k_{d}/kₐ) gives rise to the affinity constant K_{D}.

[0347] As noted above, determining binding affinity between a MOD (e.g., IL-2 or an IL-2 variant) and its cognate Co-MOD (e.g., IL-2R) also can be determined by BLI. The assay is similar to that described above for the T-Cell-MP. A BLI assay can be carried out using an Octet RED 96 (Pal FortéBio) instrument, or a similar instrument, as follows. A component MOD of a T-Cell-MP (e.g., a variant IL-2 polypeptide of the present disclosure); and a control MOD (where a control MOD comprises a wt. MOD, e.g. wt. IL-2)) are immobilized onto insoluble supports (each a “biosensor”). The MOD is the “target.” Immobilization can be effected by immobilizing a capture antibody onto the insoluble support, where the capture antibody immobilizes the MOD. For example, if the target is fused to an immuno-affinity tag (e.g. FLAG, human IgG Fc), immobilization can be effected by immobilizing with the appropriate antibody to the immuno-affinity tag (e.g. anti-human IgG Fc) onto the insoluble support, where the immobilized antibodies bind to and immobilize the MOD (where the MOD comprises an Ig Fc polypeptide). A Co-MOD (or polypeptide) is applied, at several different concentrations, to the immobilized MOD, and the instrument's response recorded. Alternatively, a Co-MOD (or polypeptide) is immobilized to the biosensor (e.g., for the IL-2 receptor heterotrimer, as a monomeric subunit, heterodimeric subcomplex, or the complete heterotrimer) and the MOD is applied, at several different concentrations, to the immobilized Co-MOD(s), and the instrument's response is recorded. Assays are conducted in a liquid medium comprising 25 mM HEPES pH 6.8, 5% poly(ethylene glycol) 6000, 50 mM KCl, 0.1% bovine serum albumin, and 0.02% Tween 20 nonionic detergent. Binding of the Co-MOD to the immobilized MOD is conducted at 30° C. BLI analyzes the interference pattern of white light reflected from two surfaces: i) from the immobilized polypeptide (“target”); and ii) an internal reference layer. A change in the number of molecules (“analyte”; e.g., Co-MOD) bound to the biosensor tip causes a shift in the interference pattern; this shift in interference pattern can be measured in real time. The two kinetic terms that describe the affinity of the target/analyte interaction are the association constant (10 and dissociation constant (k_{d}). The ratio of these two terms (k_{d}/a) gives rise to the affinity constant K_{D}. Determining the binding affinity of both a wt. MOD (e.g., IL-2) for its receptor (e.g., IL-2R) and a variant MOD (e.g., an IL-2 variant as disclosed herein) for its cognate Co-MOD (e.g., its receptor; (e.g., IL-2R) thus allows one to determine the relative binding affinity of the variant Co-MOD, as compared to the wt. Co-MOD, for the cognate Co-MOD. That is, one can determine whether the binding affinity of a variant MOD for its receptor (its cognate Co-MOD) is reduced as compared to the binding affinity of the wt. MOD for the same cognate Co-MOD, and, if so, what is the percentage reduction from the binding affinity of the wt. Co-MOD.

[0348] The BLI assay may be carried out in a multi-well plate. To run the assay, the plate layout is defined, the assay steps are defined, and biosensors are assigned in the Octet Data Acquisition software. The biosensor assembly is hydrated. The hydrated biosensor assembly and the assay plate are equilibrated for 10 minutes on the Octet instrument. Once the data are acquired, the acquired data are loaded into the Octet Data Analysis software. The data are processed in the Processing window by specifying method for reference subtraction, y-axis alignment, inter-step correction, and Savitzky-Golay filtering. Data are analyzed in the Analysis window by specifying steps to analyze (Association and Dissociation), selecting curve fit model (1:1), fitting method (global), and window of interest (in seconds). The quality of fit is evaluated. K_{D} values for each data trace (analyte concentration) can be averaged if within a 3-fold range. K_{D} error values should be within one order of magnitude of the affinity constant values; R² values should be above 0.95. See, e.g., Abdiche et al. (2008) J. Anal. Biochem. 377:209.

[0349] Unless otherwise stated herein, the affinity of a T-Cell-MP-epitope conjugate of the present disclosure for a Co-MOD, or the affinity of a control T-Cell-MP-epitope conjugate (where a control T-Cell-MP-epitope conjugate comprises a wt. MOD) for a Co-MOD, is determined using BLI, as described above. Likewise, the affinity of a MOD and its Co-MOD polypeptide can be determined using BLI as described above.

[0350] A variant MOD present in a T-Cell-MP of the present disclosure may bind to its Co-MOD with an affinity that is at least 10% less, at least 15% less, at least 20% less, at least 25% less, at least 30% less, at least 35% less, at least 40% less, at least 45% less, at least 50% less, at least 55% less, at least 60% less, at least 65% less, at least 70% less, at least 75% less, at least 80% less, at least 85% less, at least 90% less, at least 95% less, or more than 95% less, than the affinity of a corresponding wt. MOD for the Co-MOD.

[0351] In some cases, a variant MOD present in a T-Cell-MP of the present disclosure has a binding affinity for a Co-MOD that is from 1 nM to 100 nM, or from 100 nM to 100 μM. For example, in some cases, a variant MOD present in a T-Cell-MP has a binding affinity for a Co-MOD that is from about 1 nM to about 5 nM, from about 5 nM to about 10 nM, from about 10 nM to about 50 nM, from about 50 nM to about 100 nM, from about 100 nM to about 150 nM, from about 150 nM to about 200 nM, from about 200 nM to about 250 nM, from about 250 nM to about 300 nM, from about 300 nM to about 350 nM, from about 350 nM to about 400 nM, from about 400 nM to about 500 nM, from about 500 nM to about 600 nM, from about 600 nM to about 700 nM, from about 700 nM to about 800 nM, from about 800 nM to about 900 nM, from about 900 nM to about 1 μM, from about 1 μM to about 5 μM, from about 5 μM to about 10 μM, from about 10 μM to about 15 μM, from about 15 μM to about 20 μM, from about 20 μM to about 25 μM, from about 25 μM to about 50 μM, from about 50 μM to about 75 μM, or from about 75 μM to about 100 μM. In some cases, a variant MOD present in a T-Cell-MP has a binding affinity for a Co-MOD that is from about 1 nM to about 5 nM, from about 5 nM to about 10 nM, from about 10 nM to about 50 nM, or from about 50 nM to about 100 nM.

[0352] Binding affinity of a T-Cell-MP-epitope conjugate of the present disclosure to a target T cell can be measured in the following manner A) contacting a T-Cell-MP-epitope conjugate of the present disclosure with a target T cell expressing on its surface: i) a Co-MOD that binds to the parental wt. MOD; and ii) a TCR that binds to the epitope, where the T-Cell-MP-epitope conjugate comprises an epitope tag or fluorescent label (e.g., a fluorescent payload or fluorescent protein label, such as green fluorescent protein, as part of the T-Cell-MP), such that the T-Cell-MP-epitope conjugate binds to the target T cell; B) if the T-Cell-MP-epitope conjugate is unlabeled, contacting the target T cell-bound T-Cell-MP-epitope conjugate with a fluorescently labeled binding agent (e.g., a fluorescently labeled antibody) that binds to the epitope tag, generating a T-Cell-MP-epitope conjugate/target T cell/binding agent complex; and C) measuring the mean fluorescence intensity (MFI) of the T-Cell-MP-epitope conjugate/target T cell/binding agent complex using flow cytometry. The epitope tag can be, e.g., a FLAG tag, a hemagglutinin tag, a c-myc tag, a poly(histidine) tag, etc. The MFI measured over a range of concentrations of the T-Cell-MP-epitope conjugate (library member) provides a measure of the affinity. The MFI measured over a range of concentrations of the T-Cell-MP-epitope conjugate (library member) provides a half maximal effective concentration (EC₅₀) of the T-Cell-MP-epitope conjugate. In some cases, the EC₅₀ of a T-Cell-MP-epitope conjugate of the present disclosure for a target T cell is in the nM range; and the EC₅₀ of the T-Cell-MP-epitope conjugate for a control T cell (where a control T cell expresses on its surface: i) a Co-MOD that binds the parental wt. MOD; and ii) a T cell receptor that does not bind to the epitope present in the T-Cell-MP-epitope conjugate) is in the μM range. The ratio of the EC₅₀ of a T-Cell-MP-epitope conjugate of the present disclosure for a control T cell to the EC₅₀ of the T-Cell-MP-epitope conjugate for a target T cell may be at least 1.5:1, at least 2:1, at least 5:1, at least 10:1, at least 15:1, at least 20:1, at least 25:1, at least 50:1, at least 100:1, at least 500:1, at least 10^{b}:1, at least 5×10^{b}:1, at least 10³:1, at least 5×10³:1, at least 10⁴:1, at lease 10⁵:1, or at least 10⁶:1. The ratio of the EC₅₀ of a T-Cell-MP-epitope conjugate of the present disclosure for a control T cell to the EC₅₀ of the T-Cell-MP-epitope conjugate for a target T cell is an expression of the selectivity of the T-Cell-MP-epitope conjugate.

[0353] In some cases, when measured as described in the preceding paragraph, a T-Cell-MP-epitope conjugate of the present disclosure exhibits selective binding to a target T cell, compared to binding of the T-Cell-MP-epitope conjugate (library member) to a control T cell that comprises: i) the Co-MOD that binds the parental wt. MOD; and ii) a TCR that binds to an epitope other than the epitope present in the T-Cell-MP-epitope conjugate (library member).

[0354] The ratio of: i) the binding affinity of a control T-Cell-MP (where the control T-Cell-MP comprises a wt. MOD) to a cognate Co-MOD to ii) the binding affinity of a T-Cell-MP comprising a variant of the wt. MOD to the cognate Co-MOD, when measured by BLI (as described above), may be at least 1.5:1, at least 2:1, at least 5:1, at least 10:1, at least 15:1, at least 20:1, at least 25:1, at least 50:1, at least 100:1, at least 500:1, at least 10^{b}:1, at least 5×10^{b}:1, at least 10³:1, at least 5×10³:1, at least 10⁴:1, at least 10⁵:1, or at least 10⁶:1. The ratio of: i) the binding affinity of a control T-Cell-MP (where the control T-Cell-MP comprises a wt. MOD) to a cognate Co-MOD to ii) the binding affinity of a T-Cell-MP comprising a variant of the wt. MOD to the cognate Co-MOD, when measured by BLI, may be in a range of from 1.5:1 to 10⁶:1, e.g., from 1.5:1 to 10:1, from 10:1 to 50:1, from 50:1 to 10^{b}:1, from 10^{b}:1 to 10³:1, from 10³:1 to 10⁴:1, from 10⁴:1 to 10⁵:1, or from 10⁵:1 to 10⁶:1.

[0355] As an example, where a control T-Cell-MP-epitope conjugate comprises a wt. IL-2 polypeptide, and where a T-Cell-MP-epitope conjugate of the present disclosure comprises a variant IL-2 polypeptide (comprising from 1 to 10 aa substitutions relative to the aa sequence of the wt. IL-2 polypeptide) as the MOD, the ratio of: i) the binding affinity of the control T-Cell-MP-epitope conjugate to an IL-2 receptor (the Co-MOD) to ii) the binding affinity of the T-Cell-MP-epitope conjugate of the present disclosure to the IL-2 receptor (the Co-MOD), when measured by BLI, is at least 1.5:1, at least 2:1, at least 5:1, at least 10:1, at least 15:1, at least 20:1, at least 25:1, at least 50:1, at least 100:1, at least 500:1, at least 10^{b}:1, at least 5×10^{b}:1, at least 10³:1, at least 5×10³:1, at least 10⁴:1, at least 10⁵:1, or at least 10⁶:1. Where a control T-Cell-MP-epitope conjugate comprises a wt. IL-2 polypeptide, and where a T-Cell-MP-epitope conjugate of the present disclosure comprises a variant IL-2 polypeptide (comprising from 1 to 10 aa substitutions relative to the aa sequence of the wt. IL-2 polypeptide) as the MOD, the ratio of: i) the binding affinity of the control T-Cell-MP-epitope conjugate to the IL-2 receptor (the Co-MOD) to ii) the binding affinity of the T-Cell-MP-epitope conjugate of the present disclosure to the IL-2 receptor, when measured by BLI, may be in a range of from 1.5:1 to 10⁶:1, e.g., from 1.5:1 to 10:1, from 10:1 to 50:1, from 50:1 to 10^{b}:1, from 10^{b}:1 to 10³:1, from 10³:1 to 10⁴:1, from 10⁴:1 to 10⁵:1, or from 10⁵:1 to 10⁶:1. Other examples that may have the same ratios of binding affinities include T-Cell-MPs bearing a wt. MOD and T-Cell-MPs bearing a variant MOD where the wt. and variant MODs are selected from: wt. CD80 and variant CD80; wt. CD86 and a variant CD86; wt. PD-L1 and a variant PD-L1; wt. CTLA4 and a variant CTLA4; or wt. 4-1BBL and variant 4-1BBL.

[0356] A variant MOD present in a T-Cell-MP of the present disclosure may have a binding affinity for a cognate Co-MOD that is from 1 nM to 100 nM, or from 100 nM to 250 μM. For example, a variant MOD present in a T-Cell-MP may have a binding affinity for a cognate Co-MOD that is from about 1 nM to about 10 nM, from about 10 nM to about 100 nM, from about 100 nM to about 500 nM, from about 500 nM to about 750 nM, from about 750 nM to about 1 μM, from about 1 μM to about 5 μM, from about 5 μM to about 10 μM, from about 10 μM to about 25 μM, from about 25 μM to about 50 μM, from about 50 μM to about 100 μM, or from about 100 μM to about 250 μM. A variant MOD present in a T-Cell-MP may have a binding affinity for a cognate Co-MOD that is from about 1 nM to about 5 nM, from about 5 nM to about 10 nM, from about 10 nM to about 50 nM, or from about 50 nM to about 100 nM.

[0357] The combination of the reduced affinity of the MOD for its Co-MOD and the affinity of the epitope for a TCR provides for enhanced selectivity of a T-Cell-MP-epitope conjugate of the present disclosure, while still allowing for activity of the MOD. Thus, a T-Cell-MP-epitope conjugate of the present disclosure may bind selectively to a first T cell that displays both: i) a TCR specific for the epitope present in the T-Cell-MP-epitope conjugate; and ii) a Co-MOD that binds to the MOD present in the T-Cell-MP-epitope conjugate, compared to binding to a second T cell that displays: i) a TCR specific for an epitope other than the epitope present in the T-Cell-MP-epitope conjugate; and ii) a Co-MOD that binds to the MOD present in the T-Cell-MP-epitope conjugate. For example, a T-Cell-MP-epitope conjugate of the present disclosure may bind to the first T cell with an affinity that is at least 10%, at least 15%, at least 20%, at least 25%, at least 30%, at least 40%, at least 50%, at least 60%, at least 70%, at least 80%, at least 90%, at least 200% (2-fold), at least 250% (2.5-fold), at least 500% (5-fold), at least 1,000% (10-fold), at least 1,500% (15-fold), at least 2,000% (20-fold), at least 2,500% (25-fold), at least 5,000% (50-fold), at least 10,000% (100-fold), or more than 100-fold, higher than the affinity to which it binds the second T cell. See e.g., FIG. 1

[0358] b. IL-2 and its Variants

[0359] As one non-limiting example, a wt. MOD or variant MOD present in a T-Cell-MP is an IL-2 or variant IL-2 polypeptide. In some cases, a variant MOD present in a T-Cell-MP is a variant IL-2 polypeptide. Wild-type IL-2 binds to an IL-2 receptor (IL-2R). A wt. IL-2 aa sequence can be as follows: [sequence omitted] (aa 21-153 of UniProt P60568, SEQ ID NO:106).

[0360] Wild-type IL2 binds to an IL2 receptor (IL2R) on the surface of a cell. An IL2 receptor is in some cases a heterotrimeric polypeptide comprising an alpha chain (IL-2Rα; also referred to as CD25), a beta chain (IL-2Rβ; also referred to as CD122) and a gamma chain (IL-2Rγ; also referred to as CD132). Amino acid sequences of human IL-2Rα, IL2Rβ, and IL-2Rγ can be as follows.

Human IL-2Rα:
(SEQ ID NO: 107)
ELCDDDPPE IPHATFKAMA YKEGTMLNCE CKRGFRRIKS
GSLYMLCTGN SSHSSWDNQC QCTSSATRNT TKQVTPQPEE
QKERKTTEMQ SPMQPVDQAS LPGHCREPPP WENEATERIY
HFVVGQMVYY QCVQGYRALH RGPAESVCKM THGKTRWTQP
QLICTGEMET SQFPGEEKPQ ASPEGRPESE TSCLVTTTDF
QIQTEMAATM ETSIFTTEYQ VAVAGCVFLL ISVLLLSGLT
WQRRQRKSRR TI.
Human IL-2Rβ:
(SEQ ID: 108)
VNG TSQFTCFYNS RANISCVWSQ DGALQDTSCQ VHAWPDRRRW
NQTCELLPVS QASWACNLIL GAPDSQKLIT VDIVTLRVLC
REGVRWRVMA IQDFKPFENL RLMAPISLQV VHVETHRCNI
SWEISQASHY FERHLEFEAR TLSPGHTWEE APLLILKQKQ
EWICLETLTP DTQYEFQVRV KPLQGEFTTW SPWSQPLAFR
TKPAALGKDT IPWLGHLLVG LSGAFGFIIL VYLLINCRNT
GPWLKKVLKC NTPDPSKFFS QLSSEHGGDV QKWLSSPFPS
SSFSPGGLAP EISPLEVLER DKVTQLLLQQ DKVPEPASLS
SNHSLTSCFT NQGYFFFHLP DALEIEACQV YFTYDPYSEE
DPDEGVAGAP TGSSPQPLQP LSGEDDAYCT FPSRDDLLLF
SPSLLGGPSP PSTAPGGSGA GEERMPPSLQ ERVPRDWDPQ
PLGPPTPGVP DLVDFQPPPE LVLREAGEEV PDAGPREGVS
FPWSRPPGQG EFRALNARLP LNTDAYLSLQ ELQGQDPTHL V.
Human IL-2Rγ:
(SEQ ID NO: 109)
LNTTILTP NGNEDTTADF FLTTMPTDSL SVSTLPLPEV
QCFVFNVEYM NCTWNSSSEP QPTNLTLHYW YKNSDNDKVQ
KCSHYLFSEE ITSGCQLQKK EIHLYQTFVV QLQDPREPRR
QATQMLKLQN LVIPWAPENL TLHKLSESQL ELNWNNRFLN
HCLEHLVQYR TDWDHSWTEQ SVDYRHKFSL PSVDGQKRYT
FRVRSRFNPL CGSAQHWSEW SHPIHWGSNT SKENPFLFAL
EAVVISVGSM GLIISLLCVY FWLERTMPRI PTLKNLEDLV
TEYHGNFSAW SGVSKGLAES LQPDYSERLC LVSEIPPKGG
ALGEGPGASP CNQHSPYWAP PCYTLKPET.

[0361] In some cases, where a T-Cell-MP comprises a variant IL-2 polypeptide, a cognate Co-MOD is an IL-2R comprising polypeptides comprising the aa sequences of any one of SEQ ID NO:107, SEQ ID: 108, and SEQ ID NO:109.

[0362] In some cases, a variant IL-2 polypeptide exhibits reduced binding affinity to IL-2R, compared to the binding affinity of an IL-2 polypeptide comprising the aa sequence set forth in SEQ ID NO:106. For example, in some cases, a variant IL-2 polypeptide binds IL-2R with a binding affinity that is at least 10% less, at least 20% less, at least 30% less, at least 40% less, at least 50% less, at least 60% less, at least 70% less, at least 80% less, at least 90% less, at least 95% less, or more than 95% less, than the binding affinity of an IL-2 polypeptide comprising the aa sequence set forth in SEQ ID NO:106 for an IL-2R (e.g., an IL-2R comprising polypeptides comprising the aa sequence set forth in SEQ ID NOs:107-109), when assayed under the same conditions.

[0363] In some cases, a variant IL-2 polypeptide (e.g., a variant of SEQ ID NO:106) has a binding affinity to IL-2R (e.g., of SEQ ID NOs:107-109) that is from 100 nM to 100 μM. As another example, in some cases, a variant IL-2 polypeptide (e.g., a variant of SEQ ID NO:106) has a binding affinity for IL-2R (e.g., an IL-2R comprising polypeptides comprising the aa sequence set forth in SEQ ID NOs:107-109) that is from about 100 nM to about 200 nM, from about 200 nM to about 400 nM, from about 400 nM to about 600 nM, from about 600 nM to about 800 nM, from about 800 nM to about 1 μM, from about 1 μM to about 5 μM, from about 5 μM to about 10 μM, from about 10 μM to about 20 μM, from about 20 μM to about 40 μM, from about 40 μM to about 75 μM, or from about 75 μM to about 100 μM.

[0364] In some cases, a variant IL-2 polypeptide has a single aa substitution compared to the IL-2 aa sequence set forth in SEQ ID NO:106. In some cases, a variant IL-2 polypeptide has from 2 to 10 aa substitutions compared to the IL-2 aa sequence set forth in SEQ ID NO:106. In some cases, a variant IL-2 polypeptide has 2 aa substitutions compared to the IL-2 aa sequence set forth in SEQ ID NO:106. In some cases, a variant IL-2 polypeptide has 3 aa substitutions compared to the IL-2 aa sequence set forth in SEQ ID NO:106. In some cases, a variant IL-2 polypeptide has 4 aa substitutions compared to the IL-2 aa sequence set forth in SEQ ID NO:106. In some cases, a variant IL-2 polypeptide has 5 aa substitutions compared to the IL-2 aa sequence set forth in SEQ ID NO:106. In some cases, a variant IL-2 polypeptide has 6 or 7 aa substitutions compared to the IL-2 aa sequence set forth in SEQ ID NO:106. In some cases, a variant IL-2 polypeptide has 8, 9, or 10 aa substitutions compared to the IL-2 aa sequence set forth in SEQ ID NO:106.

[0365] Suitable variant IL-2 polypeptide sequences include polypeptide sequences comprising an aa sequence having at least 80% (e.g., at least 85%, at least 90%, at least 95%, at least 98%, at least 99%, or 100%) aa sequence identity to at least 80 (e.g., 90, 100, 110, 120, 130 or 133) contiguous aas of SEQ ID NO:106.

[0366] IL-2 variants include polypeptides having at least 90% (e.g., at least 95%, 98%, or 99%) aa sequence identity to at least 80 (e.g., at least 90, 100, 110, 120, or 130) contiguous aas of SEQ ID NO:106, wherein the aa at position 15 is an aa other than E. In one case, the position of H16 is substituted by Ala (H16A). In one case, the position of E15 is substituted by Ala (E15A).

[0367] IL-2 variants include polypeptides having at least 90% (e.g., at least 95%, 98%, or 99%) aa sequence identity to at least 80 (e.g., at least 90, 100, 110, 120, or 130) contiguous aas of SEQ ID NO:106, wherein the aa at position 16 is an aa other than H. In one case, the position of H16 is substituted by Asn, Cys, Gln, Met, Val, or Trp. In one case, the position of H16 is substituted by Ala. In another case, the position of H16 is substituted by Thr.

[0368] IL-2 variants include polypeptides having at least 90% (e.g., at least 95%, 98%, or 99%) aa sequence identity to at least 80 (e.g., at least 90, 100, 110, 120, or 130) contiguous aas of SEQ ID NO:106, wherein the aa at position 20 is an aa other than D. In one case, the position of D20 is substituted by Ala.

[0369] IL-2 variants include polypeptides having at least 90% (e.g., at least 95%, 98%, or 99%) aa sequence identity to at least 80 (e.g., at least 90, 100, 110, 120, or 130) contiguous aas of SEQ ID NO:106, wherein the aa at position 42 is an aa other than F. In one case, the position of F42 is substituted by Met, Pro, Ser, Thr, Trp, Tyr, Val, or His. In one case, the position of F42 is substituted by Ala. IL-2 variants include polypeptides having at least 90% (e.g., at least 95%, 98%, or 99%) aa sequence identity to at least 80 (e.g., at least 90, 100, 110, 120, or 130) contiguous aas of SEQ ID NO:106, wherein the aa at position 45 is an aa other than Y. In one case, the position of Y45 is substituted by Ala.

[0370] IL-2 variants include polypeptides having at least 90% (e.g., at least 95%, 98%, or 99%) aa sequence identity to at least 80 (e.g., at least 90, 100, 110, 120, or 130) contiguous aas of SEQ ID NO:106, wherein the aa at position 88 is an aa other than N. In one case, the position of N88 is substituted by Ala. In another case, the position of N88 is substituted by Arg.

[0371] IL-2 variants include polypeptides having at least 90% (e.g., at least 95%, 98%, or 99%) aa sequence identity to at least 80 (e.g., at least 90, 100, 110, 120, or 130) contiguous aas of SEQ ID NO:106, wherein the aa at position 126 is an aa other than Q. In one case, the position of Q126 is substituted by Ala (Q126A).

[0372] IL-2 variants include polypeptides having at least 90% (e.g., at least 95%, 98%, or 99%) aa sequence identity to at least 80 (e.g., at least 100, 110, 120, or 130) contiguous aas of SEQ ID NO:106, wherein the aa at position 16 is an aa other than H and the aa at position 42 is other than F. In one case, the position of H16 is substituted by Ala or Thr and the position of F42 is substituted by Ala or Thr. In one case, the position of H16 is substituted by Ala and the position of F42 is substituted by Ala (an H16A and F42A variant). In one case, the position of H16 is substituted by Thr and the position of F42 is substituted by Ala (an H16T and F42A variant).

[0373] An IL-2 variant may comprise an aa sequence having at least 80%, at least 85%, at least 90%, at least 95%, or at least 98% aa sequence identity to the sequence: APTSSSTKKT QLQLE [symbol] LLLD LQMILNGINN YKNPKLTRML T [symbol] KFYMPKKA TELKHLQCLE EELKPLEEVL NLAQSKNFHL RPRDLISNIN VIVLELKGSE TTFMCEYADE TATIVEFLNR WITFCQSIIS TLT (SEQ ID NO:110), wherein position 16 and 42 are substituted as follows: X₁ is any aa other than His; and X₂ is any aa other than Phe. A second IL-2 variant comprises the substitutions X₁ is Ala and X₂ is Ala (an H16A and F42A variant). A third IL-2 variant comprise the substitutions X₁ is Thr and X₂ is Ala (an H16T and F42A variant).

[0374] IL-2 variants include polypeptides having at least 90% (e.g., at least 95%, 98%, or 99%) aa sequence identity to at least 80 (e.g., at least 100, 110, 120, or 130) contiguous aas of SEQ ID NO:106, wherein the aa at position 20 is an aa other than D and the aa at position 42 is other than F. In one case, the position of D20 is substituted by Ala and the position of F42 is substituted by Ala (D20A and F42A substitutions).

[0375] IL-2 variants include polypeptides having at least 90% (e.g., at least 95%, 98%, or 99%) aa sequence identity to at least 80 (e.g., at least 100, 110, 120, or 130) contiguous aas of SEQ ID NO:106, wherein the aa at position 15 is other than E, the aa at position 20 is an aa other than D, and the aa at position 42 is other than F. In one case, the position of E15 is substituted by Ala, the position of D20 is substituted by Ala and the position of F42 is substituted by Ala (EISA, D20A, an dF42A substitutions).

[0376] IL-2 variants include polypeptides having at least 90% (e.g., at least 95%, 98%, or 99%) aa sequence identity to at least 80 (e.g., at least 100, 110, 120, or 130) contiguous aas of SEQ ID NO:106, wherein the aa at position 16 is other than H, the aa at position 20 is an aa other than D, and the aa at position 42 is other than F. In one case, the position of H16 is substituted by Ala, the position of D20 is substituted by Ala and the position of F42 is substituted by Ala (an H16A, D20A, and F42A substitution). In another case, the position H16 is substituted by Thr, the position of D20 is substituted by Ala and the position of F42 is substituted by Ala (H16T, D20A, and F42A substitutions).

[0377] IL-2 variants include polypeptides having at least 90% (e.g., at least 95%, 98%, or 99%) aa sequence identity to at least 80 (e.g., at least 100, 110, 120, or 130) contiguous aas of SEQ ID NO:106, wherein the aa at position 16 is other than H, the aa at position 42 is other than F, and the aa at position 88 is other than R. In one case, the position of H16 is substituted by Ala or Thr, the position of F42 is substituted by Ala, and the position of N88 is substituted by Arg (H16A, F42A, and N88R substitution or H16T, F42A, and N88R substitutions).

[0378] IL-2 variants include polypeptides having at least 90% (e.g., at least 95%, 98%, or 99%) aa sequence identity to at least 80 (e.g., at least 100, 110, 120, or 130) contiguous aas of SEQ ID NO:106, wherein the aa at position 16 is other than H, the aa at position 42 is other than F, and the aa at position 126 is other than Q. Such IL-2 variants include those wherein, the position of H16 is substituted by Ala or Thr, the position of F42 is substituted by Ala, and the position of Q126 is substituted by Ala (an H16A, F42A, and Q126A substitution or an H16T, F42A, and Q126A substitutions).

[0379] IL-2 variants include polypeptides having at least 90% (e.g., at least 95%, 98%, or 99%) aa sequence identity to at least 80 (e.g., at least 100, 110, 120, or 130) contiguous aas of SEQ ID NO:106, wherein the aa at position 20 is other than D, the aa at position 42 is other than F, and the aa at position 126 is other than Q. In one case, the position D20 is substituted by Ala, the position of F42 is substituted by Ala, and the position of Q126 is substituted by Ala (D20A, F42A, and Q126A substitutions).

[0380] IL-2 variants include polypeptides having at least 90% (e.g., at least 95%, 98%, or 99%) aa sequence identity to at least 80 (e.g., at least 100, 110, 120, or 130) contiguous aas of SEQ ID NO:106, wherein the aa at position 20 is other than D, the aa at position 42 is other than F, and the aa at position 45 is other than Y. In one case, the position D20 is substituted by Ala, the position of F42 is substituted by Ala, and the position of Y45 is substituted by Ala (D20A, F42A, and Y45A substitutions).

[0381] IL-2 variants include polypeptides having at least 90% (e.g., at least 95%, 98%, or 99%) aa sequence identity to at least 80 (e.g., at least 100, 110, 120, or 130) contiguous aas of SEQ ID NO:106, wherein the aa at position 16 is other than H, the aa at position 20 is other than D, the aa at position 42 is other than F, and the aa at position 45 is other than Y. Such IL-2 variants include those in which the position of H16 is substituted by Ala or Thr, the position D20 is substituted by Ala, the position of F42 is substituted by Ala, and the position of Y45 is substituted by Ala (H16A, D20A, F42A, and Y45A substitution, or H16T, D20A, F42A, and Y45A substitutions).

[0382] IL-2 variants include polypeptides having at least 90% (e.g., at least 95%, 98%, or 99%) aa sequence identity to at least 80 (e.g., at least 100, 110, 120, or 130) contiguous aas of SEQ ID NO:106, wherein the aa at position 20 is other than D, the aa at position 42 is other than F, the aa at position 45 is other than Y, and the aa at position 126 is other than Q. In one case, the position D20 is substituted by Ala, the position of F42 is substituted by Ala, the position of Y45 is substituted by Ala, and the position of Q126 is substituted by Ala (D20A, F42A, Y45A, Q126A substitutions).

[0383] IL-2 variants include polypeptides having at least 90% (e.g., at least 95%, 98%, or 99%) aa sequence identity to at least 80 (e.g., at least 100, 110, 120, or 130) contiguous aas of SEQ ID NO:106, wherein the aa at position 16 is other than H, the aa at position 20 is other than D, the aa at position 42 is other than F, the aa at position 45 is other than Y, and the aa at position 126 is other than Q. In one case, the position of H16 is substituted by Ala or Thr, the position D20 is substituted by Ala, the position of F42 is substituted by Ala, the position of Y45 is substituted by Ala, and the position of Q126 is substituted by Ala (H16A, D20A, F42A, Y45A, and Q126A substitutions or H16T, D20A, F42A, Y45A, and Q126A substitutions).

[0384] c. Fas Ligand (FasL) and its Variants

[0385] In some cases, the MOD present in a T-Cell-MP is a Fas Ligand (FasL). FasL is a homomeric type-II transmembrane protein in the tumor necrosis factor (TNF) family FasL signals by trimerization of the Fas receptor in a target cell, which forms a death-inducing complex leading to apoptosis of the target cell. Soluble FasL results from matrix metalloproteinase-7 (MMP-7) cleavage of membrane-bound FasL at a conserved site.

[0386] In an embodiment, a wt. Homo sapiens FasL protein has the sequence MQQPFNYPYP QIYWVDSSAS SPWAPPGTVL PCPTSVPRRP GQRRPPPPPP PPPLPPPPPP PPLPPLPLPP LKKRGNHSTG LCLLVMFFMV LVALVGLGLG MFQLFHLQKE LAELRESTSQ MHTASSLEKQ IGHPSPPPEK KELRKVAHLT GKSNSRSMPL EWEDTYGIVL LSGVKYKKGG LVINETGLYF VYSKVYFRGQ SCNNLPLSHK VYMRNSKYPQ DLVMMEGKMM SYCTTGQMWA RSSYLGAVFN LTSADHLYVN VSELSLVNFE ESQTFFGLYK L, (SEQ ID NO:111), NCBI Ref. Seq. NP_000630.1, UniProtKB—P48023 where residues 1-80 are cytoplasmic, 810102 are the transmembrane domain and aas 103-281 are extracellular (ectodomain).

[0387] A suitable FasL polypeptide comprises all or part of the ectodomain of FasL: QLFHLQKE LAELRESTSQ MHTASSLEKQ IGHPSPPPEK KELRKVAHLT GKSNSRSMPL EWEDTYGIVL LSGVKYKKGG LVINETGLYF VYSKVYFRGQ SCNNLPLSHK VYMRNSKYPQ DLVMMEGKMM SYCTTGQMWA RSSYLGAVFN LTSADHLYVN VSELSLVNFE ESQTFFGLYK L (SEQ ID NO:112).

[0388] A Fas receptor can have the sequence MLGIWTLLPL VLTSVARLSS KSVNAQVTDI NSKGLELRKT VTTVETQNLE GLHHDGQFCH KPCPPGERKA RDCTVNGDEP DCVPCQEGKE YTDKAHFSSK CRRCRLCDEG HGLEVEINCT RTQNTKCRCK PNFFCNSTVC EHCDPCTKCE HGIIKECTLT SNTKCKEEGS RSNLGWLCLL LLPIPLIVWV KRKEVQKTCR KHRKENQGSH ESPTLNPETV AINLSDVDLS KYITTIAGVM TLSQVKGFVR KNGVNEAKID EIKNDNVQDT AEQKVQLLRN WHQLHGKKEA YDTLIKDLKK ANLCTLAEKI QTIILKDITS DSENSNFRNE IQSLV, (SEQ ID NO:113) NCBI Reference Sequence: NP_000034.1, UniProtKB—P25445, where aas 26-173 form the ectodomain (extracellular domain), aas 174-190 form the transmembrane domain, and 191-335 the cytoplasmic domain. The ectodomain may be used to determine binding affinity with FasL.

[0389] In some cases, a variant FasL polypeptide (e.g., comprising a variant of SEQ ID NO:112) exhibits reduced binding affinity to a mature Fas receptor sequence (e.g., a FasL receptor comprising all or part of the polypeptides set forth in SEQ ID NO:113, such as its ectodomain), compared to the binding affinity of an FasL polypeptide comprising the aa sequence set forth in SEQ ID NO:112. For example, in some cases, a variant FasL polypeptide (e.g., comprising a variant of SEQ ID NO:112) binds an Fas receptor (e.g., comprising all or part of the polypeptides set forth in SEQ ID NOs: 102, such as its ectodomains), with a binding affinity that is at least 10% less, at least 20% less, at least 30% less, at least 40% less, at least 50% less, at least 60% less, at least 70% less, at least 80% less, at least 90% less, at least 95% less, or more than 95% less, than the binding affinity of an FasL polypeptide comprising the aa sequence set forth in SEQ ID NO:111 or 112.

[0390] In some cases, a variant FasL polypeptide (e.g., comprising a variant of SEQ ID NO:112) has a binding affinity for an Fas receptor (e.g., comprising all or part of the polypeptides set forth in SEQ ID NO:113, such as its ectodomain), that is from 1 nM to 1 mM (e.g., from 1 nM to 10 nM, from 10 nM to 100 nM, from 100 nM to 1 μM, from 1 μM to 10 μM, from 10 μM to 100 μM, or from 100 μM to 1 mM). As another example, in some cases, a variant FasL polypeptide (e.g., comprising a variant of SEQ ID NO:101) has a binding affinity for a mature Fas receptor (e.g., comprising all or part of the polypeptides set forth in SEQ ID NO:113, such as its ectodomains), that is from about 100 nM to about 200 nM, from about 200 nM to about 400 nM, from about 400 nM to about 600 nM, from about 600 nM to about 800 nM, from about 800 nM to about 1 μM, from about 1 μM to about 5 μM, from about 5 μM to about 10 μM, from about 10 μM to about 20 μM, from about 20 μM to about 40 μM, from about 40 μM to about 75 μM, or from about 75 μM to about 100 μM.

[0391] In some cases, a variant FasL polypeptide (e.g., comprising a variant of SEQ ID NO:112) has a single aa substitution compared to the FasL polypeptide sequence set forth in SEQ ID NO:112). In some cases, a variant FasL polypeptide (e.g., comprising a variant of SEQ ID NO:112)) has from 2 aa to 10 aa substitutions compared to the FasL polypeptide sequence set forth in SEQ ID NO:112). In some cases, a variant FasL polypeptide has 2 aa substitutions compared to the FasL polypeptide sequence set forth in SEQ ID NO:112). In some cases, a variant FasL polypeptide has 3 aa or 4 aa substitutions compared to the FasL polypeptide sequence set forth in SEQ ID NO:112). In some cases, a variant FasL polypeptide has 5 aa substitutions compared to the FasL polypeptide sequence set forth in SEQ ID NO:112). In some cases, a variant FasL polypeptide has 6 aa or 7 aa substitutions compared to the FasL polypeptide sequence set forth in SEQ ID NO:112). In some cases, a variant FasL polypeptide has 8aa, 9 aa, or 10 aa substitutions compared to the FasL polypeptide sequence set forth in SEQ ID NO:112).

[0392] Suitable variant FasL polypeptide sequences include polypeptide sequences with at least 80%, at least 85%, at least 90%, at least 95%, at least 98%, or at least 99% aa sequence identity to at least 140 contiguous aa (e.g., at least 150, at least 160, at least 170, or at least 175 contiguous aa) of SEQ ID NO:112 (e.g., which have at least one aa substitution, deletion or insertion). FasL variants include polypeptides having at least 90% (e.g., at least 95%, 98%, or 99%) aa sequence identity to at least 80 (e.g., at least 100, 110, 120, or 130) contiguous aas of SEQ ID NO:112), and bear one or more aa substitutions from aa 1 to aa 50. Such Fas L variants may comprise the substitutions of at least one, at least two, or at least three aas with an Ala or Gly.

[0393] FasL variants include polypeptides having at least 90% (e.g., at least 95%, 98%, or 99%) aa sequence identity to at least 80 (e.g., at least 100, 110, 120, or 130) contiguous aas of SEQ ID NO:112), and bear one or more aa substitutions from aa 51 to 100. Such Fas L variants may comprise the substitutions of at least one, at least two, or at least three aas with an Ala or Gly.

[0394] FasL variants include polypeptides having at least 90% (e.g., at least 95%, 98%, or 99%) aa sequence identity to at least 80 (e.g., at least 100, 110, 120, or 130) contiguous aas of SEQ ID NO:112), and bear one or more aa substitutions from aa 101 to 150. Such Fas L variants may comprise the substitutions of at least one, at least two, or at least three aas with an Ala or Gly.

[0395] FasL variants include polypeptides having at least 90% (e.g., at least 95%, 98%, or 99%) aa sequence identity to at least 80 (e.g., at least 100, 110, 120, or 130) contiguous aas of SEQ ID NO:112) and bear one or more aa substitutions from aa 151 to 170. Such Fas L variants may comprise the substitutions of at least one, at least two, or at least three aas with an Ala or Gly. Independent of, or in addition to, any Ala or Gly substitutions, any of the above-mentioned Fas L variants may comprise the substitutions of at least one, at least two, or at least three positively charged aas with an Asp (D) or Glu (E), and/or at least one, at least two, or at least three negatively charged aas with Arg (R) or Lys (K) residues.

[0396] d. PD-L1 and its Variants

[0397] As one non-limiting example, a wt. MOD or variant MOD present in a T-Cell-MP is a PD-L1 or variant PD-L1 polypeptide. Wild-type PD-L1 binds to PD1 and CD80 (also known as B7-1). A wt. human PD-L1 polypeptide can comprise the following aa sequence: MRIFAVFIFM TYWHLLNAFT VTVPKDLYVV EYGSNMTIEC KFPVEKQLDL AALIVYWEME DKNIIQFVHG EEDLKVQHSS YRQRARLLKD QLSLGNAALQ ITDVKLQDAG VYRCMISYGG ADYKRITVKV NAPYNKINQR ILVVDPVTSE HELTCQAEGY PKAEVIWTSS DHQVLSGKTT TTNSKREEKL FNVTSTLRIN TTTNEIFYCT FRRLDPEENH TAELVIPGNI LNVSIKICLT LSPST (SEQ ID NO:114); where aas 1-18 form the signal sequence, aas 19-127 form the Ig-like V-type or IgV domain, and 133-225 for the Ig-like C2 type domain.

[0398] A wt. human PD-L1 ectodomain can comprise the following aa sequence: FT VTVPKDLYVV EYGSNMTIEC KFPVEKQLDL AALIVYWEME DKNIIQFVHG EEDLKVQHSS YRQRARLLKD QLSLGNAALQ ITDVKLQDAG VYRCMISYGG ADYKRITVKV NAPYNKINQR ILVVDPVTSE HELTCQAEGY PKAEVIWTSS DHQVLSGKTT TTNSKREEKL FNVTSTLRIN TTTNEIFYCT FRRLDPEENH TAELVIPGNI LNVSIKI (SEQ ID NO:115); where aas 1-109 form the Ig-like V-type or “IgV” domain, and aas 115-207 for the Ig-like C2 type domain.

[0399] A wt. PD-L1 IgV domain, suitable for use as a MOD may comprise aas 18-127 or aas 19-127 of SEQ D No. 114, and a carboxyl terminal stabilization sequences, such as for instance the last seven aas (bolded and italicized) of the sequence: A FTVTVPKDLY VVEYGSNMTI ECKFPVEKQL DLAALIVYWE MEDKNIIQFV HGEEDLKTQH SSYRQRARLL KDQLSLGNAA [symbol] ITDVKLQD AGVYRCMISY GGADYKRITV KVNAPY [symbol] SEQ ID NO:116. Where the carboxyl stabilizing sequence comprises a histidine (e.g., a histidine approximately 5 residues to the C-terminal side of the Tyr (Y) appearing as aa 117 of SEQ ID NO:116) to about aa 122, the histidine may form a stabilizing electrostatic bond with the backbone amide at aas 82 and 83 (bolded and italicized in SEQ ID NO:116 (Q107 and L106 of SEQ ID NO:114). As an alternative, a stabilizing disulfide bond may be formed by substituting one of aas 82 or 83) (Q107 and L106 of SEQ ID NO:114) and one of aa residues 121, 122, or 123 (equivalent to aa positions 139-141 of SEQ ID NO:114).

[0400] A wt. PD-1 polypeptide can comprise the following aa sequence: PGWFLDSPDR PWNPPTFSPA LLVVTEGDNA TFTCSFSNTS ESFVLNWYRM SPSNQTDKLA AFPEDRSQPG QDCRFRVTQL PNGRDFHMSV VRARRNDSGT YLCGAISLAP KAQIKESLRA ELRVTERRAE VPTAHPSPSP RPAGQFQTLV VGVVGGLLGS LVLLVWVLAV ICSRAARGTI GARRTGQPLK EDPSAVPVFS VDYGELDFQW REKTPEPPVP CVPEQTEYAT IVFPSGMGTS SPARRGSADG PRSAQPLRPE DGHCSWPL (SEQ ID NO:117).

[0401] In some cases, a variant PD-L1 polypeptide (e.g. a variant of SEQ ID NO:115 or PD-L1's IgV domain) exhibits reduced binding affinity to PD-1 (e.g., a PD-1 polypeptide comprising the aa sequence set forth in SEQ ID NO:117), compared to the binding affinity of a PD-L1 polypeptide comprising the aa sequence set forth in SEQ ID NO:114 or SEQ ID NO:115. For example, in some cases, a variant PD-L1 polypeptide binds PD-1 (e.g., a PD-1 polypeptide comprising the aa sequence set forth in SEQ ID NO:117) with a binding affinity that is at least 10% less, at least 20% less, at least 30% less, at least 40% less, at least 50% less, at least 60% less, at least 70% less, at least 80% less, at least 90% less, at least 95% less, or more than 95% less than the binding affinity of a PD-L1 polypeptide comprising the aa sequence set forth in SEQ ID NO:114 or SEQ ID NO:115.

[0402] In some cases, a variant PD-L1 polypeptide (e.g. a variant of SEQ ID NO:115 or its IgV domain) has a binding affinity to PD-1 (e.g. of SEQ ID NO:117) that is from 1 nM to 1 mM (e.g., from 1 nM to 10 nM, from 10 nM to 100 nM, from 100 nM to 1 μM, from 1 μM to 10 μM, from 10 μM to 100 μM, or from 100 μM to 1 mM). As another example, in some cases, a variant PD-L1 polypeptide (e.g. a variant of SEQ ID NO:115) has a binding affinity for PD1 (e.g., a PD1 polypeptide comprising the aa sequence set forth in SEQ ID NO:117) that is from about 100 nM to about 200 nM, from about 200 nM to about 400 nM, from about 400 nM to about 600 nM, from about 600 nM to about 800 nM, from about 800 nM to about 1 μM, from about 1 μM to about 5 μM, from about 5 μM to about 10 μM, from about 10 μM to about 20 μM, from about 20 μM to about 40 μM, from about 40 μM to about 75 μM, or from about 75 μM to about 100 μM.

[0403] A number of aa substitutions may be made in the PD-L1 ectodomain sequences used as MODs, including substitutions to sequences having greater than 90% (95%, 98% or 99%) sequence identity to at least 85 contiguous aas (e.g., at least 90, at least 95, at least 100, or at least 105 contiguous aas) of any one of SEQ ID NO:114, SEQ ID NO:115, aas 19-127 (the IgV domain) of SEQ ID NO:114, and SEQ ID NO:116. The substitutions may include disulfide bond substitution pair D103C and G33C, or the pair V104 and S34C (based on SEQ ID NO:114). The substitutions also include salt bridge forming substitution pair Q107D and K62R or the pair Q107D and S80R (based on SEQ ID NO:114). In addition, the substitutions include the Pi stacking substitutions M36Y or M36F (based on SEQ ID NO:114). A PD-L1 MOD sequence may comprise a sequence having at least 85 contiguous aas (e.g., at least 90, at least 95, at least 100, or at least 105 contiguous aas) of SEQ ID NO:115, and at least one (e.g., at least two or at least three) disulfide, salt bridge, and/or Pi stacking substitution. A PD-L1 MOD sequence may comprise a sequence having at least 85 contiguous aas (e.g., at least 90, at least 95, at least 100, or at least 105 contiguous aas) of aas 19-127 (the IgV domain) of SEQ ID NO:114, and at least one (e.g., at least two or at least three) disulfide, salt bridge, and/or Pi stacking substitution. A PD-L1 MOD sequence may comprise a sequence having at least 85 contiguous aas (e.g., at least 90, at least 95, at least 100, or at least 105 contiguous aas) of aas SEQ ID NO:116, and at least one (e.g., at least two or at least three) disulfide, salt bridge, and/or Pi stacking substitution.

[0404] In some cases, a variant PD-L1 polypeptide has a single aa substitution compared to the PD-L1 aa sequence set forth in SEQ ID NO:114, SEQ ID NO:115 or PD-L1's IgV domain. In some cases, a variant PD-L1 polypeptide has from 2 aa to 10 aa substitutions compared to the PD-L1 aa sequence set forth in SEQ ID NO:114, SEQ ID NO:115 or PD-L1's IgV domain. In some cases, a variant PD-L1 polypeptide has 2 aa substitutions compared to the PD-L1 aa sequence set forth in SEQ ID NO:114, SEQ ID NO:115 or PD-L1's IgV domain. In some cases, a variant PD-L1 polypeptide has 3 aa or 4 aa substitutions compared to the PD-L1 aa sequence set forth in SEQ ID NO:114, SEQ ID NO:115 or PD-L1's IgV domain. In some cases, a variant PD-L1 polypeptide has 5 aa or 6 aa substitutions compared to the PD-L1 aa sequence set forth in SEQ ID NO:114, SEQ ID NO:115 or PD-L1's IgV domain. In some cases, a variant PD-L1 polypeptide has 7 aa or 8 aa substitutions compared to the PD-L1 aa sequence set forth in SEQ ID NO:114, SEQ ID NO:115 or PD-L1's IgV domain. In some cases, a variant PD-L1 polypeptide has 9 aa or 10 aa substitutions compared to the PD-L1 aa sequence set forth in SEQ ID NO:114, SEQ ID NO:115 or PD-L1's IgV domain.

[0405] Suitable variant PD-L1 polypeptide sequences include polypeptide sequences having at least 80%, at least 85%, at least 90%, at least 95%, at least 98%, or at least 99% aa sequence identity to at least 170 contiguous aa (e.g., at least 180, 190 or 200 contiguous aa) of SEQ ID NO:115 (e.g. which have at least one aa insertion, deletion or substitution). Suitable variant PD-L1 IgV polypeptide sequences include polypeptide sequences having at least 80%, at least 85%, at least 90%, at least 95%, at least 98%, or at least 99% aa sequence identity to at least 70 contiguous aa (e.g., at least 80, 90, 100 or 105 contiguous aas) of aas 1-109 of SEQ ID NO:115 (e.g. which have at least one aa insertion, deletion or substitution).

[0406] Variant PD-L1 polypeptide sequences include polypeptide sequences having at least 90% (e.g., at least 95%, 98%, or 99%) aa sequence identity to at least 80 (e.g., at least 90, 100, or 109, 110, 120, 150, 180, 190, 200, 210, or 219) contiguous aas of SEQ ID NO:115, comprising a substitution of one or more (two or more, or all three) of the Asp at aa 8, Ile at aa 36, and/or the Glu at aa 54.

[0407] Variant PD-L1 polypeptide sequences include polypeptide sequences having at least 90% (e.g., at least 95%, 98%, or 99%) aa sequence identity to at least 80 (e.g., at least 90, 100, or 109, 110, 120, 150, 180, 190, 200, 210, or 219) contiguous aas of SEQ ID NO:115, wherein the aa at position 8 is an aa other than D. In one case, the position of D8 is substituted by Ala. In another such embodiment the position of D8 is substituted by Arg.

[0408] Variant PD-L1 polypeptide sequences include polypeptide sequences having at least 90% (e.g., at least 95%, 98%, or 99%) aa sequence identity to at least 80 (e.g., at least 90, 100, or 109, 110, 120, 150, 180, 190, 200, 210, or 219) contiguous aas of SEQ ID NO:115, wherein the aa at position 36 is an aa other than I. In one case, the position of 136 is substituted by Ala. In another such embodiment, the position of 136 is substituted by Asp.

[0409] Variant PD-L1 polypeptide sequences also include polypeptide sequences having at least 90% (e.g., at least 95%, 98%, or 99%) aa sequence identity to at least 80 (e.g., at least 90, 100, or 109, 110, 120, 150, 180, 190, 200, 210, or 219) contiguous aas of SEQ ID NO:115, wherein the aa at position 54 is an aa other than E. In one case, the position of E 54 is substituted by Ala. In another such embodiment E54 is substituted by Arg.

[0410] e. CD80 and its Variants

[0411] In some cases, a variant MOD present in a T-Cell-MP is a variant CD80 polypeptide. Wild-type CD80 binds to CD28.

[0412] A wt. aa sequence of the ectodomain of human CD80 can be as follows: VIHVTK EVKEVATLSC GHNVSVEELA QTRIYWQKEK KMVLTMMSGD MNIWPEYKNR TIFDITNNLS IVILALRPSD EGTYECVVLK YEKDAFKREH LAEVTLSVKA DFPTPSISDF EIPTSNIRRI ICSTSGGFPE PHLSWLENGE ELNAINTTVS QDPETELYAV SSKLDFNMTT NHSFMCLIKY GHLRVNQTFN WNTTKQEHFP DN (SEQ ID NO:118). See NCBI Reference Sequence: NP_005182.1. The aa sequence of the IgV domain of a wt. human CD80 can be as follows: VIHVTK EVKEVATLSC GHNVSVEELA QTRIYWQKEK KMVLTMMSGD MNIWPEYKNR TIFDITNNLS IVILALRPSD EGTYECVVLK YEKDAFKREH LAEVTLSV, (SEQ ID NO:119), which is aas 1-104 of SEQ ID NO:118.

[0413] A wt. CD28 aa sequence can be as follows: MLRLLLALNL FPSIQVTGNK ILVKQSPMLV AYDNAVNLSC KYSYNLFSRE FRASLHKGLD SAVEVCVVYG NYSQQLQVYS KTGFNCDGKL GNESVTFYLQ NLYVNQTDIY FCKIEVMYPP PYLDNEKSNG TIIHVKGKHL CPSPLFPGPS KPFWVLVVVG GVLACYSLLV TVAFIIFWVR SKRSRLLHSD YMNMTPRRPG PTRKHYQPYA PPRDFAAYRS (SEQ ID NO:120).

[0414] A wt. CD28 aa sequence can be as follows: MLRLLLALNL FPSIQVTGNK ILVKQSPMLV AYDNAVNLSW KHLCPSPLFP GPSKPFWVLV VVGGVLACYS LLVTVAFIIF WVRSKRSRLL HSDYMNMTPR RPGPTRKHYQ PYAPPRDFAA YRS (SEQ ID NO:121)

[0415] A wt. CD28 aa sequence can be as follows: MLRLLLALNL FPSIQVTGKH LCPSPLFPGP SKPFWVLVVV GGVLACYSLL VTVAFIIFWV RSKRSRLLHS DYMNMTPRRP GPTRKHYQPY APPRDFAAYR S (SEQ ID NO:122).

[0416] In some cases, a variant CD80 polypeptide exhibits reduced binding affinity to CD28, compared to the binding affinity of a CD80 polypeptide comprising the aa sequence set forth in SEQ ID NO:118, or the IgV domain sequence SEQ ID NO:119, for CD28. For example, in some cases, a variant CD80 polypeptide binds CD28 with a binding affinity that is at least 10% less, at least 20% less, at least 30% less, at least 40% less, at least 50% less, at least 60% less, at least 70% less, at least 80% less, at least 90% less, at least 95% less, or more than 95% less, than the binding affinity of a CD80 polypeptide comprising the aa sequence set forth in SEQ ID NO:118 for CD28 (e.g., a CD28 polypeptide comprising the aa sequence set forth in one of SEQ ID NO:120, SEQ ID NO:121, or SEQ ID NO:122).

[0417] In some cases, a variant CD80 polypeptide has a binding affinity to CD28 that is from 100 nM to 100 μM. As another example, in some cases, a variant CD80 polypeptide of the present disclosure has a binding affinity for CD28 (e.g., a CD28 polypeptide comprising the aa sequence set forth in SEQ ID NO:120, SEQ ID NO:121, or SEQ ID NO:122) that is from about 100 nM to about 200 nM, from about 200 nM to about 400 nM, from about 400 nM to about 600 nM, from about 600 nM to about 800 nM, from about 800 nM to about 1 μM, from about 1 μM to about 5 μM, from about 5 μM to about 10 μM, from about 10 μM to about 20 μM, from about 20 μM to about 40 μM, from about 40 μM to about 75 μM, or from about 75 μM to about 100 μM.

[0418] In some cases, a variant CD80 polypeptide has a single aa substitution compared to the CD80 aa sequence set forth in SEQ ID NO:118 or 119. In some cases, a variant CD80 polypeptide has from 1 to 10 aa substitutions compared to the CD80 aa sequence set forth in SEQ ID NO:118 or 119. In some cases, a variant CD80 polypeptide has 1 aa substitution compared to the CD80 aa sequence set forth in SEQ ID NO:118 or 119. In some cases, a variant CD80 polypeptide has 2 aa substitutions compared to the CD80 aa sequence set forth in SEQ ID NO:118 or 119. In some cases, a variant CD80 polypeptide has 3 aa substitutions compared to the CD80 aa sequence set forth in SEQ ID NO:118. In some cases, a variant CD80 polypeptide has 4 aa substitutions compared to the CD80 aa sequence set forth in SEQ ID NO:118 or 119. In some cases, a variant CD80 polypeptide has 5 aa substitutions compared to the CD80 aa sequence set forth in SEQ ID NO:118 or 119. In some cases, a variant CD80 polypeptide has 6 or 7 aa substitutions compared to the CD80 aa sequence set forth in SEQ ID NO:118 or 119. In some cases, a variant CD80 polypeptide has 8, 9, or 10 aa substitutions compared to the CD80 aa sequence set forth in SEQ ID NO:118 or 119.

[0419] Some CD80 ectodomain variants with at least one aa substitution include those having at least 90%, at least 95%, at least 98%, or at least 99% aa sequence identity to SEQ ID NO:118 or the IgV domain sequence SEQ ID NO:119.

[0420] Some suitable CD80 ectodomain variants include polypeptides having at least 90%, at least 95%, at least 98%, or at least 99% aa sequence identity to SEQ ID NO:118 or the IgV domain sequence SEQ ID NO:119, and which have at least one (e.g., at least two, or at least three) aa substitution in that sequence from about residue 19 through about residue 67 including those that follow.

[0421] CD80 ectodomain variants include polypeptides having at least 90% (e.g., at least 95%, 98%, or 99%) aa sequence identity to at least 80 (e.g., at least 90, 100, or 104, 120, 150, 180, 200, or 208) contiguous aas of SEQ ID NO:118 or the IgV domain sequence SEQ ID NO:119, wherein the aa at position 19 is an aa other than N. In one case, the position of N19 is substituted by Ala. In another such embodiment N19 is substituted by Arg.

[0422] CD80 ectodomain variants include polypeptides having at least 90% (e.g., at least 95%, 98%, or 99%) aa sequence identity to at least 80 (e.g., at least 90, 100, or 104, 120, 150, 180, 200, or 208) contiguous aas of SEQ ID NO:118 or the IgV domain sequence SEQ ID NO:119, wherein the aa at position 25 is an aa other than L. In one case, the position of L25 is substituted by Ala.

[0423] CD80 ectodomain variants include polypeptides having at least 90% (e.g., at least 95%, 98%, or 99%) aa sequence identity to at least 80 (e.g., at least 90, 100, or 104, 120, 150, 180, 200, or 208) contiguous aas of SEQ ID NO:118 or the IgV domain sequence SEQ ID NO:119, wherein the aa at position 31 is an aa other than Y. In one case, the position of Y31 is substituted by Ala.

[0424] CD80 ectodomain variants include polypeptides having at least 90% (e.g., at least 95%, 98%, or 99%) aa sequence identity to at least 80 (e.g., at least 90, 100, or 104, 120, 150, 180, 200, or 208) contiguous aas of SEQ ID NO:118 or the IgV domain sequence SEQ ID NO:119, wherein the aa at position 33 is an aa other than Q. In one case, the position of Q33 is substituted by Ala.

[0425] CD80 ectodomain variants include polypeptides having at least 90% (e.g., at least 95%, 98%, or 99%) aa sequence identity to at least 80 (e.g., at least 90, 100, or 104, 120, 150, 180, 200, or 208) contiguous aas of SEQ ID NO:118 or the IgV domain sequence SEQ ID NO:119, wherein the aa at position 38 is an aa other than M. In one such embodiment, the position of M38 is substituted by Ala.

[0426] CD80 ectodomain variants include polypeptides having at least 90% (e.g., at least 95%, 98%, or 99%) aa sequence identity to at least 80 (e.g., at least 90, 100, or 104, 120, 150, 180, 200, or 208) contiguous aas of SEQ ID NO:118 or the IgV domain sequence SEQ ID NO:119, wherein the aa at position 39 is an aa other than V. In one case, the position of V39 is substituted by Ala.

[0427] CD80 ectodomain variants include polypeptides having at least 90% (e.g., at least 95%, 98%, or 99%) aa sequence identity to at least 80 (e.g., at least 90, 100, or 104, 120, 150, 180, 200, or 208) contiguous aas of SEQ ID NO:118 or the IgV domain sequence SEQ ID NO:119, wherein the aa at position 49 is an aa other than I. In one case, the position of 149 is substituted Ala.

[0428] CD80 ectodomain variants include polypeptides having at least 90% (e.g., at least 95%, 98%, or 99%) aa sequence identity to at least 80 (e.g., at least 90, 100, or 104, 120, 150, 180, 200, or 208) contiguous aas of SEQ ID NO:118 or the IgV domain sequence SEQ ID NO:119, wherein the aa at position 53 is an aa other than Y. In one case, the position of Y53 is substituted by Ala.

[0429] CD80 ectodomain variants include polypeptides having at least 90% (e.g., at least 95%, 98%, or 99%) aa sequence identity to at least 80 (e.g., at least 90, 100, or 104, 120, 150, 180, 200, or 208) contiguous aas of SEQ ID NO:118 or the IgV domain sequence SEQ ID NO:119, wherein the aa at position 60 is an aa other than D. In one case, the position of D60 is substituted by Ala.

[0430] CD80 ectodomain variants include polypeptides having at least 90% (e.g., at least 95%, 98%, or 99%) aa sequence identity to at least 80 (e.g., at least 90, 100, or 104, 120, 150, 180, 200, or 208) contiguous aas of SEQ ID NO:118 or the IgV domain sequence SEQ ID NO:119, wherein the aa at position 63 is an aa other than N. In one case, the position of N63 is substituted by Ala.

[0431] CD80 ectodomain variants include polypeptides having at least 90% (e.g., at least 95%, 98%, or 99%) aa sequence identity to at least 80 (e.g., at least 90, 100, or 104, 120, 150, 180, 200, or 208) contiguous aas of SEQ ID NO:118 or the IgV domain sequence SEQ ID NO:119, wherein the aa at position 67 is an aa other than I. In one case, the position of 167 is substituted by Ala.

[0432] Some suitable CD80 ectodomain variants include polypeptides having at least 90%, at least 95%, at least 98%, or at least 99%, aa sequence identity to at least 80 (e.g., at least 90, 100, or 104, 120, 150, 180, 200, or 208) contiguous aas of SEQ ID NO:118 or the IgV domain sequence SEQ ID NO:119, and which have at least one (e.g., at least two, or at least three) aa substitution in that sequence from about residue 86 through about residue 118, including those that follow.

[0433] CD80 ectodomain variants include polypeptides having at least 90% (e.g., at least 95%, 98%, or 99%) aa sequence identity to at least 80 (e.g., at least 90, 100, or 104, 120, 150, 180, 200, or 208) contiguous aas of SEQ ID NO:118 or the IgV domain sequence SEQ ID NO:119, wherein the aa at position 86 is an aa other than K. In one case, the position of K86 is substituted by Ala.

[0434] CD80 ectodomain variants include polypeptides having at least 90% (e.g., at least 95%, 98%, or 99%) aa sequence identity to at least 80 (e.g., at least 90, 100, or 104, 120, 150, 180, 200, or 208) contiguous aas of SEQ ID NO:118 or the IgV domain sequence SEQ ID NO:119, wherein the aa at position 119 is an aa other than F. In one case, the position of F119 is substituted by Ala. CD80 ectodomain variants include polypeptides having at least 90% (e.g., at least 95%, 98%, or 99%) aa sequence identity to at least 80 (e.g., at least 90, 100, or 104, 120, 150, 180, 200, or 208) contiguous aas of SEQ ID NO:118 or the IgV domain sequence SEQ ID NO:119, wherein the aa at position 118 is an aa other than P. In one case, the position of P118 is substituted by Ala.

[0435] Some suitable CD80 ectodomain variants include polypeptides having at least 90%, at least 95%, at least 98%, or at least 99%, aa sequence identity to at least 80 (e.g., at least 90, 100, or 104, 120, 150, 180, 200, or 208) contiguous aas of SEQ ID NO:118 or the IgV domain sequence SEQ ID NO:119, and which have at least one (e.g., at least two, or at least three) aa substitution in that sequence from about residue 156 through about residue 158, include those that follow.

[0436] CD80 ectodomain variants include polypeptides having at least 90% (e.g., at least 95%, 98%, or 99%) aa sequence identity to at least 80 (e.g., at least 90, 100, or 104, 120, 150, 180, 200, or 208) contiguous aas of SEQ ID NO:118 or the IgV domain sequence SEQ ID NO:119, wherein the aa at position 156 is an aa other than S. In one case, the position of aa156 is substituted by Ala.

[0437] CD80 ectodomain variants include polypeptides having at least 90% (e.g., at least 95%, 98%, or 99%) aa sequence identity to at least 80 (e.g., at least 90, 100, or 104, 120, 150, 180, 200, or 208) contiguous aas of SEQ ID NO:118 or the IgV domain sequence SEQ ID NO:119, wherein the aa at position 157 is an aa other than Q. In one case, the position of aa157 is substituted by Ala.

[0438] CD80 ectodomain variants include polypeptides having at least 90% (e.g., at least 95%, 98%, or 99%) aa sequence identity to at least 80 (e.g., at least 90, 100, or 104, 120, 150, 180, 200, or 208) contiguous aas of SEQ ID NO:118 or the IgV domain sequence SEQ ID NO:119, wherein the aa at position 158 is an aa other than D. In one case, the position of aa158 is substituted by Ala.

[0439] CD80 variants include polypeptides that comprises an aa sequence having at least 80% (e.g., at least 85%, at least 90%, at least 95%, at least 98%, at least 99%, or 100%) aa sequence identity to at least 80 (e.g., 90, 100, 110, 120, 130 or 133) contiguous aas of SEQ ID NO:118 or the IgV domain sequence SEQ ID NO:119 and comprise at least one of the CD80 sequence variations set forth in the Table of CD80 Variant MODs.

[0440] f. CD86 and its Variants

[0441] In some cases, a variant MOD present in a T-Cell-MP is a variant CD86 polypeptide. Wild-type CD86 binds to CD28.

[0442] The aa sequence of the full ectodomain of a wt. human CD86 can be as follows:

(SEQ ID NO: 123)
APLKIQAYFNETADLPCQFANSQNQSLSELVVFWQDQENLVLNEVYLGK
EKFDSVHSKYMNRTSFDSDSWTLRLHNLQIKDKGLYQCIIHHKKPTGMI
RIHQMNSELSVLANFSQPEIVPISNITENVYINLTCSSIHGYPEPKKMS
VLLRTKNSTIEYDGIMQKSQDNVTELYDVSISLSVSFPDVTSNMTIFCI
LETDKTRLLSSPFSIELEDPQPPPDHIP.

[0443] The aa sequence of the IgV domain of a wt. human CD86 can be as follows:

(SEQ ID NO: 124)
APLKIQAYFNETADLPCQFANSQNQSLSELVVFWQDQENLVLNEVYLGK
EKFDSVHSKYMNRTSFDSDSWTLRLHNLQIKDKGLYQCIIHHKKPTGMI
RIHQMNSELSVL.

[0444] In some cases, a variant CD86 polypeptide exhibits reduced binding affinity to CD28, compared to the binding affinity of a CD86 polypeptide comprising the aa sequence set forth in SEQ ID NO:123 or SEQ ID NO: 124 for CD28. For example, in some cases, a variant CD86 polypeptide binds CD28 with a binding affinity that is at least 10% less, at least 20% less, at least 30% less, at least 40% less, at least 50% less, at least 60% less, at least 70% less, at least 80% less, at least 90% less, at least 95% less, or more than 95% less, than the binding affinity of a CD86 polypeptide comprising the aa sequence set forth in SEQ ID NO:123 or SEQ ID NO:124 for CD28 (e.g., a CD28 polypeptide comprising the aa sequence set forth in one of SEQ ID NO:120, SEQ ID NO:121, or SEQ ID NO:122).

[0445] In some cases, a variant CD86 polypeptide has a binding affinity to CD28 that is from 100 nM to 100 μM. As another example, in some cases, a variant CD86 polypeptide of the present disclosure has a binding affinity for CD28 (e.g., a CD28 polypeptide comprising the aa sequence set forth in one of SEQ ID NO:120, SEQ ID NO:121, or SEQ ID NO:122) that is from about 100 nM to about 200 nM, from about 200 nM to about 400 nM, from about 400 nM to about 600 nM, from about 600 nM to about 800 nM, from about 800 nM to about 1 μM, from about 1 μM to about 5 μM, from about 5 μM to about 10 μM, from about 10 μM to about 20 μM, from about 20 μM to about 40 μM, from about 40 μM to about 75 μM, or from about 75 μM to about 100 μM.

[0446] In some cases, a variant CD86 polypeptide has a single aa substitution compared to the CD86 aa sequence set forth in SEQ ID NO:123 or 124. In some cases, a variant CD86 polypeptide has from 2 to 10 aa substitutions compared to the CD86 aa sequence set forth in SEQ ID NO:123. In some cases, a variant CD86 polypeptide has 2 aa substitutions compared to the CD86 aa sequence set forth in SEQ ID NO:123 or 124. In some cases, a variant CD86 polypeptide has 3 aa substitutions compared to the CD86 aa sequence set forth in SEQ ID NO:123 or 124. In some cases, a variant CD86 polypeptide has 4 aa substitutions compared to the CD86 aa sequence set forth in SEQ ID NO:123 or 124. In some cases, a variant CD86 polypeptide has 5 aa substitutions compared to the CD86 aa sequence set forth in SEQ ID NO:123 or 124. In some cases, a variant CD86 polypeptide has 6 or 7 aa substitutions compared to the CD86 aa sequence set forth in SEQ ID NO:123 or 124. In some cases, a variant CD86 polypeptide has 8, 9, or 10 aa substitutions compared to the CD86 aa sequence set forth in SEQ ID NO:123 or 124.

[0447] Some CD86 ectodomain variants with at least one aa substitution include those having at least 90%, at least 95%, at least 98%, or at least 99% aa sequence identity to at least 80 (e.g., at least 90, 100, or 109, 120, 150, 180, 200, or 224) contiguous aas of SEQ ID NO:123 or the IgV domain sequence SEQ ID NO:124. Suitable CD86 ectodomain variants include polypeptides having at least 90%, at least 95%, at least 98%, or at least 99% aa sequence identity to SEQ ID NO 8123 or 124, and which have at least one (e.g., at least two, or at least three) aa substitution in that sequence from about residue 33 through about residue 110, including those that follow.

[0448] CD86 ectodomain variants include polypeptides having at least 90% (e.g., at least 95%, 98%, or 99%) aa sequence identity to at least 80 (e.g., at least 90, 100, or 109, 120, 150, 180, 200, or 224) contiguous aas of SEQ ID NO:123 or 124, wherein the aa at position 33 is an aa other than F. In one case, the position of F33 is substituted by Ala. CD86 ectodomain variants include polypeptides having at least 90% (e.g., at least 95%, 98%, or 99%) aa sequence identity to at least 80 (e.g., at least 90, 100, or 109, 120, 150, 180, 200, or 224) contiguous aas of SEQ ID NO:123 or 124, wherein the aa at position 35 is an aa other than Q. In one case, the position of Q35 is substituted by Ala. CD86 ectodomain variants include polypeptides having at least 90% (e.g., at least 95%, 98%, or 99%) aa sequence identity to at least 80 (e.g., at least 90, 100, or 109, 120, 150, 180, 200, or 224) contiguous aas of SEQ ID NO:123 or 124, wherein the aa at position 41 is an aa other than V. In one case, the position of V41 is substituted by Ala. CD86 ectodomain variants include polypeptides having at least 90% (e.g., at least 95%, 98%, or 99%) aa sequence identity to at least 80 (e.g., at least 90, 100, or 109, 120, 150, 180, 200, or 224) contiguous aas of SEQ ID NO:123 or 124, wherein the aa at position 59 is an aa other than Y. In one case, the position of Y59 is substituted by Ala. CD86 ectodomain variants include polypeptides having at least 90% (e.g., at least 95%, 98%, or 99%) aa sequence identity to at least 80 (e.g., at least 90, 100, or 109, 120, 150, 180, 200, or 224) contiguous aas of SEQ ID NO:123 or 124, wherein the aa at position 61 is an aa other than N. In one case, the position of N61 is substituted by Ala. CD86 ectodomain variants include polypeptides having at least 90% (e.g., at least 95%, 98%, or 99%) aa sequence identity to at least 80 (e.g., at least 90, 100, or 109, 120, 150, 180, 200, or 224) contiguous aas of SEQ ID NO:123 or 124, wherein the aa at position 66 is an aa other than D. In one case, the position of D66 is substituted by Ala. CD86 ectodomain variants include polypeptides having at least 90% (e.g., at least 95%, 98%, or 99%) aa sequence identity to at least 80 (e.g., at least 90, 100, or 109, 120, 150, 180, 200, or 224) contiguous aas of SEQ ID NO:123 or 124, wherein the aa at position 70 is an aa other than W. In one case, the position of W70 is substituted by Ala. CD86 ectodomain variants include polypeptides having at least 90% (e.g., at least 95%, 98%, or 99%) aa sequence identity to at least 80 (e.g., at least 90, 100, or 109, 120, 150, 180, 200, or 224) contiguous aas of SEQ ID NO:123 or 124, wherein the aa at position 72 is an aa other than L. In one case, the position of L72 is substituted by Ala. CD86 ectodomain variants include polypeptides having at least 90% (e.g., at least 95%, 98%, or 99%) aa sequence identity to at least 80 (e.g., at least 90, 100, or 109, 120, 150, 180, 200, or 224) contiguous aas of SEQ ID NO:123 or 124, wherein the aa at position 91 is an aa other than H. In one case, the position of H91 is substituted by Ala. CD86 ectodomain variants include polypeptides having at least 90% (e.g., at least 95%, 98%, or 99%) aa sequence identity to at least 80 (e.g., at least 90, 100, or 109, 120, 150, 180, 200, or 224) contiguous aas of SEQ ID NO:123 or 124, wherein the aa at position 110 is an aa other than L. In one case, the position of L110 is substituted by Ala.

[0449] CD86 ectodomain variants include polypeptides having at least 90% (e.g., at least 95%, 98%, or 99%) aa sequence identity to at least 80 (e.g., at least 90, 100, or 109, 120, 150, 180, 200, or 224) contiguous aas of SEQ ID NO:123 or 124, wherein N61 is an aa other than Asn, and wherein H91 is an aa other than His. In an embodiment, the positions of both Asn 61 and His 91 are substituted by Ala (N61A, and H91A substitutions). CD86 ectodomain variants include polypeptides having at least 90% (e.g., at least 95%, 98%, or 99%) aa sequence identity to at least 80 (e.g., at least 90, 100, or 109, 120, 150, 180, 200, or 224) contiguous aas of SEQ ID NO:123 or 124, wherein D66 is an aa other than Asp, and wherein H91 is an aa other than His. In an embodiment, the positions of both Asp66 and His 91 are substituted by Ala (D66A and H91A substitutions). CD86 ectodomain variants include polypeptides having at least 90% (e.g., at least 95%, 98%, or 99%) aa sequence identity to at least 80 (e.g., at least 90, 100, or 109, 120, 150, 180, 200, or 224) contiguous aas of SEQ ID NO:123 or 124, wherein N61 is an aa other than Asn, D66 is an aa other than Asp, and wherein H91 is an aa other than His. In one case, the positions of Asn 61, Asp 66 and His 91 are substituted by Ala (N61A, D66A and H91A substitutions).

[0450] g. 4-1BBL and its Variants

[0451] In some cases, a variant MOD present in a T-Cell-MP is a variant 4-1BBL polypeptide. Wild-type 4-1BBL binds to 4-1BB (CD137).

[0452] A wt. 4-1BBL aa sequence can be as follows: MEYASDASLD PEAPWPPAPR ARACRVLPWA LVAGLLLLLL LAAACAVFLA CPWAVSGARA SPGSAASPRL REGPELSPDD PAGLLDLRQG MFAQLVAQNV LLIDGPLSWY SDPGLAGVSL TGGLSYKEDT KELVVAKAGV YYVFFQLELR RVVAGEGSGS VSLALHLQPL RSAAGAAALA LTVDLPPASS EARNSAFGFQ GRLLHLSAGQ RLGVHLHTEA RARHAWQLTQ GATVLGLFRV TPEIPAGLPS PRSE (SEQ ID NO:125). NCBI Reference Sequence: NP_003802.1, where aas 29-49 are a transmembrane region,

[0453] In some cases, a variant 4-1BBL polypeptide is a variant of the tumor necrosis factor (TNF) homology domain (THD) of human 4-1BBL. A wt. aa sequence of the THD of human 4-1BBL can comprise, e.g., one of SEQ ID NOs:126-128, as follows:

(SEQ ID NO: 126)
PAGLLDLRQG MFAQLVAQNV LLIDGPLSWY SDPGLAGVSL
TGGLSYKEDT KELVVAKAGV YYVFFQLELR RVVAGEGSGS
VSLALHLQPL RSAAGAAALA LTVDLPPASS EARNSAFGFQ
GRLLHLSAGQ RLGVHLHTEA RARHAWQLTQ GATVLGLFRV
TPEIPAGLPS PRSE;
(SEQ ID NO: 127)
D PAGLLDLRQG MFAQLVAQNV LLIDGPLSWY SDPGLAGVSL
TGGLSYKEDT KELVVAKAGV YYVFFQLELR RVVAGEGSGS
VSLALHLQPL RSAAGAAALA LTVDLPPASS EARNSAFGFQ
GRLLHLSAGQ RLGVHLHTEA RARHAWQLTQ GATVLGLFRV
TPEIPAGLPS PRSE;
and
(SEQ ID NO: 128)
D PAGLLDLRQG MFAQLVAQNV LLIDGPLSWY SDPGLAGVSL
TGGLSYKEDT KELVVAKAGV YYVFFQLELR RVVAGEGSGS
VSLALHLQPL RSAAGAAALA LTVDLPPASS EARNSAFGFQ
GRLLHLSAGQ RLGVHLHTEA RARHAWQLTQ GATVLGLFRV
TPEIPA.

A wt. 4-1BB aa sequence can be as follows: MGNSCYNIVA TLLLVLNFER TRSLQDPCSN CPAGTFCDNN RNQICSPCPP NSFSSAGGQR TCDICRQCKG VFRTRKECSS TSNAECDCTP GFHCLGAGCS MCEQDCKQGQ ELTKKGCKDC CFGTFNDQKR GICRPWTNCS LDGKSVLVNG TKERDVVCGP SPADLSPGAS SVTPPAPARE PGHSPQIISF FLALTSTALL FLLFFLTLRF SVVKRGRKKL LYIFKQPFMR PVQTTQEEDG CSCRFPEEEE GGCEL (SEQ ID NO:129).

[0454] In some cases, a variant 4-1BBL polypeptide exhibits reduced binding affinity to 4-1BB, compared to the binding affinity of a 4-1BBL polypeptide comprising the aa sequence set forth in one of SEQ ID NOs: 126-128. For example, in some cases, a variant 4-1BBL polypeptide of the present disclosure binds 4-1BB with a binding affinity that is at least 10% less, at least 20% less, at least 30% less, at least 40% less, at least 50% less, at least 60% less, at least 70% less, at least 80% less, at least 90% less, at least 95% less, or more than 95% less, than the binding affinity of a 4-1BBL polypeptide comprising the aa sequence set forth in one of SEQ ID NOs:125-128 for a 4-1BB polypeptide (e.g., a 4-1BB polypeptide comprising the aa sequence set forth in SEQ ID NO:129), when assayed under the same conditions.

[0455] In some cases, a variant 4-1BBL polypeptide has a binding affinity to 4-1BB that is from 100 nM to 100 μM. As another example, in some cases, a variant 4-1BBL polypeptide has a binding affinity for 4-1BB (e.g., a 4-1BB polypeptide comprising the aa sequence set forth in SEQ ID NO:129) that is from about 100 nM to about 200 nM, from about 200 nM to about 400 nM, from about 400 nM to about 600 nM, from about 600 nM to about 800 nM, from about 800 nM to about 1 μM, from about 1 μM to about 5 μM, from about 5 μM to about 10 μM, from about 10 μM to about 20 μM, from about 20 μM to about 40 μM, from about 40 μM to about 75 μM, or from about 75 μM to about 100 μM.

[0456] In some cases, a variant 4-1BBL polypeptide has a single aa substitution compared to the 4-1BBL aa sequence set forth in one of SEQ ID NOs: 126-128. In some cases, a variant 4-1BBL polypeptide has from 2 to 10 aa substitutions compared to the 4-1BBL aa sequence set forth in one of SEQ ID NOs:126-128. In some cases, a variant 4-1BBL polypeptide has 2 aa substitutions compared to the 4-1BBL aa sequence set forth in one of SEQ ID NOs:125-128. In some cases, a variant 4-1BBL polypeptide has 3 aa substitutions compared to the 4-1BBL aa sequence set forth in one of SEQ ID NOs:126-128. In some cases, a variant 4-1BBL polypeptide has 4 aa substitutions compared to the 4-1BBL aa sequence set forth in one of SEQ ID NOs:126-128. In some cases, a variant 4-1BBL polypeptide has 5 aa substitutions compared to the 4-1BBL aa sequence set forth in one of SEQ ID NOs:126-128. In some cases, a variant 4-1BBL polypeptide has 6 or 7 aa substitutions compared to the 4-1BBL aa sequence set forth in one of SEQ ID NOs:125-128. In some cases, a variant 4-1BBL polypeptide has 7, 8 or 9 aa substitutions compared to the 4-1BBL aa sequence set forth in one of SEQ ID NOs: 126-128.

[0457] Some 4-1BBL variants with at least one aa substitution include those having at least 90%, at least 95%, at least 98%, or at least 99% aa sequence identity to at least 140 (e.g., at least 160, 175, 180, or 181) contiguous aas of SEQ ID NO:126.

[0458] Suitable 4-1BBL variants include polypeptides having at least 90%, at least 95%, at least 98%, or at least 99% aa sequence identity to SEQ ID NO:126, and which have at least one aa substitution in that sequence from residue 11 through residue 30. Some 4-1BB1 variants with substitutions from residue 11 through residue 30 include polypeptides having at least 90% (e.g., at least 95%, 98%, or 99%) aa sequence identity to at least 140 (e.g., at least 160, 175, 180, or 181) contiguous aas of SEQ ID NO:126 wherein: the aa at position 11 is an aa other than M, the aa at position 12 is an aa other than F, the aa at position 14 is an aa other than Q, the aa at position 15 is an aa other than L, the aa at position 16 is an aa other than V, the aa at position 18 is an aa other than Q, the aa at position 19 is an aa other than N, the aa at position 20 is an aa other than V, the aa at position 21 is an aa other than L, the aa at position 22 is an aa other than L, the aa at position 23 is an aa other than I, the aa at position 24 is an aa other than D, the aa at position 25 is an aa other than G, the aa at position 26 is an aa other than P, the aa at position 27 is an aa other than L, the aa at position 28 is an aa other than S, the aa at position 29 is an aa other than W., or the aa at position 30 is an aa other than Y. 4-1BBL variants include polypeptides having at least 90% (e.g., at least 95%, 98%, or 99%) aa sequence identity to at least 140 (e.g., at least 160, 175, 180, or 181) contiguous aas of SEQ ID NO:126 where one of aas 11, 12, 14, 15, 16, 18, 19, 20, 21, 22, 23, 24, 25, 26, 27, 28, 29, or 30 are substituted by an Ala.

[0459] Suitable 4-1BBL variants include polypeptides having at least 90%, at least 95%, at least 98%, or at least 99% aa sequence identity to SEQ ID NO:126, and which have at least one aa substitution in that sequence from residue 31 through residue 50. Some 4-1BB1 variants with substitutions from residue 31 through residue 50 include polypeptides having at least 90% (e.g., at least 95%, 98%, or 99%) aa sequence identity to at least 140 (e.g., at least 160, 175, 180, or 181) contiguous aas of SEQ ID NO:126 wherein: the aa at position 31 is an aa other than S, the aa at position 32 is an aa other than D, the aa at position 33 is an aa other than P, the aa at position 34 is an aa other than G, the aa at position 35 is an aa other than L. the aa at position 37 is an aa other than G, the aa at position 38 is an aa other than V. the aa at position 39 is an aa other than S, the aa at position 40 is an aa other than L. the aa at position 41 is an aa other than T, the aa at position 42 is an aa other than G, the aa at position 43 is an aa other than G, the aa at position 44 is an aa other than L, the aa at position 45 is an aa other than S, the aa at position 46 is an aa other than Y, the aa at position 47 is an aa other than K, the aa at position 48 is an aa other than E, the aa at position 49 is an aa other than D, or the aa at position 50 is an aa other than T.

[0460] Suitable 4-1BBL variants include polypeptides having at least 90%, at least 95%, at least 98%, at least 99% aa sequence identity to SEQ ID NO:126, and which have at least one aa substitution in that sequence from residue 51 through residue 78. Some 4-1BB1 variants with substitutions from reside 51 through residue 78 include those that follow. 4-1BBL variants include polypeptides having at least 90% (e.g., at least 95%, 98%, or 99%) aa sequence identity to at least 140 (e.g., at least 160, 175, 180, or 181) contiguous aas of SEQ ID NO:126 where one of aas 31, 32, 33, 34, 35, 37, 38, 39, 40, 41, 42, 43, 44, 45, 46, 47, 48, 49, or 50 are substituted by an Ala.

[0461] Suitable 4-1BBL variants include polypeptides having at least 90%, at least 95%, at least 98%, or at least 99% aa sequence identity to SEQ ID NO:126, and which have at least one aa substitution in that sequence from residue 51 through residue 100. Some 4-1BB1 variants with substitutions from residue 51 through residue 100 include polypeptides having at least 90% (e.g., at least 95%, 98%, or 99%) aa sequence identity to at least 140 (e.g., at least 160, 175, 180, or 181) contiguous aas of SEQ ID NO:126 wherein: the aa at position 51 is an aa other than K, the aa at position 52 is an aa other than E, the aa at position 65 is an aa other than F, the aa at position 66 is an aa other than Q, the aa at position 67 is an aa other than, the aa at position 68 is an aa other than E, the aa at position 69 is an aa other than L, the aa at position 70 is an aa other than R, the aa at position 71 is an aa other than R, the aa at position 72 is an aa other than V, the aa at position 73 is an aa other than V, the aa at position 75 is an aa other than G, the aa at position 76 is an aa other than E, the aa at position 77 is an aa other than G, or the aa at position 78 is an aa other than S. 4-1BBL variants include polypeptides having at least 90% (e.g., at least 95%, 98%, or 99%) aa sequence identity to at least 140 (e.g., at least 160, 175, 180, or 181) contiguous aas of SEQ ID NO:126 where one of aas 51, 52, 65, 66, 67, 68, 69 70, 71, 72, 73, 74, 76, 77, or 78 are substituted by an Ala.

[0462] Suitable 4-1BBL variants include polypeptides having at least 90%, at least 95%, at least 98%, or at least 99% aa sequence identity to SEQ ID NO:126, and which have at least one aa substitution in that sequence from residue 103 through residue 117. Some 4-1BB1 variants with substitutions from residue 103 through residue 117 include polypeptides having at least 90% (e.g., at least 95%, 98%, or 99%) aa sequence identity to at least 140 (e.g., at least 160, 175, 180, or 181) contiguous aas of SEQ ID NO:126 wherein: the aa at position 103 is an aa other than V, the aa at position 104 is an aa other than D, the aa at position 105 is an aa other than L, the aa at position 106 is an aa other than P, the aa at position 109 is an aa other than S, the aa at position 110 is an aa other than S, the aa at position 111 is an aa other than E, the aa at position 113 is an aa other than R, the aa at position 125 is an aa other than N, or the aa at position 115 is an aa other than S. In one case, the position of 5115 is substituted by Ala, or the aa at position 117 is an aa other than F.

[0463] 4-1BBL variants include polypeptides having at least 90% (e.g., at least 95%, 98%, or 99%) aa sequence identity to at least 140 (e.g., at least 160, 175, 180, or 181) contiguous aas of SEQ ID NO:126 where one of aas 103, 104, 105, 106, 109, 110, 111, 113, 114, 115, or 117 are substituted by an Ala.

[0464] Suitable 4-1BBL variants include polypeptides having at least 90%, at least 95%, at least 98%, or at least 99% aa sequence identity to SEQ ID NO:126, and which have at least one aa substitution in that sequence from residue 130 through residue 154. Some 4-1BB1 variants with substitutions from residue 130 through residue 154 include polypeptides having at least 90% (e.g., at least 95%, 98%, or 99%) aa sequence identity to at least 140 (e.g., at least 160, 175, 180, or 181) contiguous aas of SEQ ID NO:126 wherein: the aa at position 130 is an aa other than Q, the aa at position 131 is an aa other than R, the aa at position 132 is an aa other than L, the aa at position 133 is an aa other than G, the aa at position 134 is an aa other than V, the aa at position 135 is an aa other than H, the aa at position 136 is an aa other than L, the aa at position 137 is an aa other than H, the aa at position 138 is an aa other than T, the aa at position 139 is an aa other than E, the aa at position 141 is an aa other than R, the aa at position 143 is an aa other than R, the aa at position 144 is an aa other than H, the aa at position 146 is an aa other than W, the aa at position 147 is an aa other than Q, the aa at position 148 is an aa other than L, the aa at position 149 is an aa other than T, the aa at position 150 is an aa other than Q, the aa at position 151 is an aa other than G, the aa at position 153 is an aa other than T, or the aa at position 154 is an aa other than V. 4-1BBL variants include polypeptides having at least 90% (e.g., at least 95%, 98%, or 99%) aa sequence identity to at least 140 (e.g., at least 160, 175, 180, or 181) contiguous aas of SEQ ID NO:126 where one of aas 130, 131, 132, 133, 134, 135, 136, 137, 138, 139, 141, 143, 144, 146, 147, 148, 149, 150, 151, 153, or 154 are substituted by an Ala.

[0465] 4-1BBL variants include polypeptides having at least 90% (e.g., at least 95%, at least 98%, or at least 99%) aa sequence identity to at least 140 (e.g., at least 160, 175, 180, or 181) contiguous aas of SEQ ID NO:126 and comprise a substitution of K47 (K127 of SEQ ID NO:125) with an aa other than Lys. In an embodiment, K47 is substituted with an Ala to form a K47A substitutions (a K127A substitution in SEQ ID NO:126). In an embodiment, the positions of both Asp66 and His 91 are substituted by Ala (e.g., D66A and H91A substitutions in SEQ ID NO:126).

[0466] h. Anti-CD28

[0467] In some cases, antibodies or antibody sequences directed against CD28 (e.g., an anti-CD28 antibody, an anti-body fragment binding CD28, or an scFv, nanobody, or diabody binding to CD28) may be employed as a MOD in a T-Cell-MP. The ability of anti-CD28 antibodies to act as a superagonist, agonist, or antagonist of CD28 activity has been described. See e.g., Poirier et al., (2012) Amer. J. of Transplantation, “CD28-Specific Immunomodulating Antibodies: What Can Be Learned From Experimental Models?” 12:1682-1690. Of particular interest are anti-CD28 antibodies that act as an agonist or superagonist.

[0468] Anti-CD28 antibodies or anti-CD28 sequences may be included in T-Cell-MPs in the absence of any other MOD sequences. Alternatively, antibodies or antibody sequences directed against CD28 by be incorporated into a T-Cell-MP along with one or more additional MODs, or variant MODs. In an embodiment, A T-Cell-MP comprises one or more (e.g., two) anti-CD28 antibody or anti-CD28 sequences along with one or more (e.g., two) 4-1BBL MODs or variant MODs, such as those described above. In an embodiment, A T-Cell-MP comprises one or more (e.g., two) anti-CD28 antibody or anti-CD28 sequences along with one or more (e.g., two) IL-2 MODs or variant IL-2 MODs, such as those described above. For example, the substitutions in the variant IL-2 MOD may include H16A or H16T along with an F42A or F42T substitution. By way of example, a T-Cell-MP may comprise one or more (e.g., two) anti-CD28 antibody or anti-CD28 sequences (e.g., an anti-CD28 scFv) along with one or more variant IL-2 MODs comprising H16A and/or F42A substitutions.

[0469] In some cases, an anti-CD28 antibody suitable for inclusion in a T-Cell-MP comprises: a) VL CDR1, VL CDR2, and VL CDR3 present in a light chain variable region (VL) comprising the following amino acid sequence: QWYQQKPGQPPKLLIFAASNVESGVPARFSGSGSGTNFSLNIHPVDEDDVA MYFCQQSRKVPYTFGGGTKLEIKR (SEQ ID NO:559); and b) VH CDR1, CDR2, and CDR3 present in a heavy chain variable region (VH) comprising the following amino acid sequence: QVKLQQSGPGL VTPSQSLSITCTVSGFSLSDYGVHWVRQSPGQGLEWLGVIWAGGGTNYNSALMSRKSISKDNSK SQVFLKMNSLQADDTAVYYCARDKGYSYYYSMDYWGQGTTVTVSS (SEQ ID NO:560). In some cases, the V_{H} and V_{L} CDRs are as defined by Kabat (see, e.g., the CDR Table, above; and Kabat 1991). In some cases, the V_{H} and V_{L} CDRs are as defined by Chothia (see, e.g., the CDR Table, above; and Chothia 1987). In some cases, the VH CDRs are: DYGVH (VH CDR1) (SEQ ID NO:561); VIWAGGGT NYNSALMS (VH CDR2) (SEQ ID NO:562); and DKGYSYYYSMDY (VH CDR3) (SEQ ID NO:563).

[0470] In some cases, an anti-CD28 antibody suitable for inclusion in a T-Cell-MP comprises: a) a VL region comprising an amino acid sequence having at least 90%, at least 95%, at least 98%, at least 99%, or 100%, amino acid sequence identity to the following amino acid sequence: QWYQQKPGQPPKLLIF AASNVESGVPARFSGSGSGTNFSLNIHPVDEDDVAMYFCQQSRKVPYTFGGGTKLEIKR (SEQ ID NO:559); and b) a VH region comprising an amino acid sequence having at least 90%, at least 95%, at least 98%, at least 99%, or 100%, amino acid sequence identity to the following amino acid sequence:

(SEQ ID NO: 560)
QVKLQQSGPGLVTPSQSLSITCTVSGFSLSDYGVHWVRQSPGQGLEWLG
VIWAGGGTNYNSALMSRKSISKDNSKSQVFLKMNSLQADDTAVYYCARD
KGYSYYYSMDYWGQGTTVTVSS.

[0471] In some cases, an anti-CD28 antibody suitable for inclusion in a T-Cell-MP is a scFv comprising, in order from N-terminus to C-terminus: a) a VL region comprising an amino acid sequence having at least 90%, at least 95%, at least 98%, at least 99%, or 100%, amino acid sequence identity to the following amino acid sequence: QWYQQKPGQPPKLLIFAASNVESGVPARFSGSGSGTNFSLNIHPV DEDDVAMYFCQQSRKVPYTFGGGTKLEIKR (SEQ ID NO:559); b) a peptide linker; and c) a VH region comprising an amino acid sequence having at least 90%, at least 95%, at least 98%, at least 99%, or 100%, amino acid sequence identity to the following amino acid sequence: QVKLQQSGPGLVTPSQ SLSITCTVSGFSLSDYGVHWVRQSPGQGLEWLGVIWAGGGTNYNSALMSRKSISKDNSKSQVFL KMNSLQADDTAVYYCARDKGYSYYYSMDYWGQGTTVTVSS (SEQ ID NO:560). In some cases, the peptide linker comprises the amino acid sequence (GGGGS)n, where n is an integer from 1 to 10 (e.g., where n is 1, 2, 3, 4, 5, 6, 7, 8, 9, or 10). In some cases, the peptide linker comprises the amino acid sequence GGGGSGGGGSGGGGS (SEQ ID NO:538) and has a length of 15 amino acids.

[0472] In some cases, an anti-CD28 antibody suitable for inclusion in a T-Cell-MP is a scFv comprising, in order from N-terminus to C-terminus: a) a VH region comprising an amino acid sequence having at least 90%, at least 95%, at least 98%, at least 99%, or 100%, amino acid sequence identity to the following amino acid sequence: QVKLQQSGPGLVTPSQSLSITCTVSGFSLSDYGVHWVRQSPGQG LEWLGVIWAGGGTNYNSALMSRKSISKDNSKSQVFLKMNSLQADDTAVYYCARDKGYSYYYS MDYWGQGTTVTVSS (SEQ ID NO:560); b) a peptide linker; and c) a VL region comprising an amino acid sequence having at least 90%, at least 95%, at least 98%, at least 99%, or 100%, amino acid sequence identity to the following amino acid sequence: QWYQQKPGQPPKLLIFAASNVESGVPARF SGSGSGTNFSLNIHPVDEDDVAMYFCQQSRKVPYTFGGGTKLEIKR (SEQ ID NO:559). In some cases, the peptide linker comprises the amino acid sequence (GGGGS)n, where n is an integer from 1 to 10 (e.g., where n is 1, 2, 3, 4, 5, 6, 7, 8, 9, or 10). In some cases, the peptide linker comprises the amino acid sequence GGGGSGGGGSGGGGS (SEQ ID NO:538) and has a length of 15 amino acids.

### 6 Linkers

[0473] T-Cell-MPs (and their T-Cell-MP-epitope conjugates) can include one or more independently selected linker polypeptide sequences interposed between, for example, any one or more of:
[0474] i) two MOD polypeptides located on the N-terminal side of the β2M polypeptide sequence (referred to as an L1 linker or position);
[0475] (ii) between a MOD and a β2M polypeptide sequence (referred to as an L2 linker or position);
[0476] (iii) between a β2M polypeptide sequence and a MHC-H polypeptide sequence (referred to as an L3 linker or position);
[0477] (iv) between a MHC-H polypeptide sequence and a scaffold polypeptide sequence (referred to as an L4 linker or position);
[0478] (iv) at the carboxyl end of the scaffold or between a scaffold polypeptide sequence and a MOD polypeptide sequence placed carboxy terminal to it (referred to as an L5 linker or position); or
[0479] (vi) between two MOD polypeptide sequences placed on the carboxy side of the scaffold (referred to as an L6 linker or position).

### See, e.g., FIG. 5.

[0480] Chemical conjugation sites for coupling epitopes (e.g., peptide epitopes) may be incorporated into linkers (e.g., L1-L6 linkers) including the L3 between the MHC-H and β2M polypeptide sequences. Accordingly, chemical conjugation sites including, but not limited to: sulfatase, sortase, transglutaminase, selenocysteine, non-natural amino acids, and naturally occurring proteinogenic amino acids (e.g., cysteine residues) etc. may be incorporated into linkers, including the L3 linker. Polypeptide linkers placed at either the N- or C-termini provide locations to couple additional polypeptides (e.g., histidine tags), payloads and the like, and to protect the polypeptide from exo-proteases.

[0481] Linkers may also be utilized between the peptide epitope and any reactive chemical moiety (group) used to couple the peptide epitope to the chemical conjugation site of an unconjugated T-Cell-MP (see e.g., FIG. 10). Linkers utilized between epitope (e.g., peptide epitope) and a reactive chemical moiety may be peptide/polypeptide linkers, and/or other chemical linkers (e.g., non-peptide linkers in the form of homo or hetero bifunctional linkers that comprise an alkyl group as a spacer, see e.g., FIG. 10 at entries d and e).

[0482] Suitable polypeptide linkers (also referred to as “spacers”) can be readily selected and can be of any of a number of suitable lengths, such as from 1 aa to 50 aa, from 1aa to 5 aa, from 1 aa to 15 aa, from 2 aa to 15 aa, from 2 aa to 25 aa, from 3 aa to 12 aa, from 4 aa to 10 aa, from 4 aa to 35 aa, from 5 aa to 35 aa, from 5 aa to 10 aa, from 5 aa to 20 aa, from 6 aa to 25 aa, from 7 aa to 35 aa, from 8aa to 40 aa, from 9 aa to 45 aa, from 10 to 15 aa, from 10 aa to 50 aa, from 15 to 20 aa, from 20 to 40 aa, or from 40 to 50 aa. Suitable polypeptide linkers in the range from 10 to 50 aas in length may be from 10 to 20, from 10 to 25, from 15 to 25, from 20 to 30, from 25 to 35, from 25 to 50 30 to 35, from 35 to 45, or from 40 to 50). In embodiments, a suitable linker can be 1, 2, 3, 4, 5, 6, 7, 8, 9, 10, 11, 12, 13, 14, 15, 16, 17, 18, 19, 20, 21, 22, 23, 24, 25, 26, 27, 28, 29, 30, 31, 32, 33, 34, 35, 36, 37, 38, 39, 40, 41, 42, 43, 44, 45, 46, 47, 48, 49, or 50 aa in length. A polypeptide linker may have a length of from 15 aa to 50 aa, e.g., from 20 to 35, from 25 to 30, from 25 to 45, from 30 to 35, from 35 to 40, from 40 to 45, or from 45 to 50 aa in length.

[0483] Polypeptide linkers in the T-Cell-MP may include, for example, polypeptides that comprise, consist essentially of, or consists of: i) Gly and/or Ser; ii) Ala and Ser; iii) Gly, Ala, and Ser; iv) Gly, Ser, and Cys (e.g., a single Cys residue); v) Ala, Ser, and Cys (e.g., a single Cys residue); and vi) Gly, Ala, Ser, and Cys (e.g., a single Cys residue). Exemplary linkers may comprise glycine polymers, glycine-serine polymers, glycine-alanine polymers; alanine-serine polymers (including, for example polymers comprising the sequences GA, AG, AS, SA, GS, GSGGS (SEQ ID NO:130) or GGGS (SEQ ID NO:131), any of which may be repeated from 1 to 10 times (e.g., repeated 1, 2, 3, 4, 5, 6, 7, 8, 9, or 10 times); and other flexible linkers known in the art. Glycine and glycine-serine polymers can both be used as both Gly and Ser are relatively unstructured and therefore can serve as a neutral tether between components. Glycine polymers access significantly more phi-psi space than even alanine polymers, and are much less restricted than residues with longer side chains (see Scheraga, Rev. Computational Chem. 11173-142 (1992)). Exemplary linkers may also comprise an aa sequence comprising, but not limited to, GGSG (SEQ ID NO:132), GGSGG (SEQ ID NO:133), GSGSG (SEQ ID NO:134), GSGGG (SEQ ID NO:135), GGGSG (SEQ ID NO:136), GSSSG (SEQ ID NO:137), any of which may be repeated from 1 to 15 times (e.g., repeated 1, 2, 3, 4, 5, 6, 7, 8, 9, 10, 11, 12, 13, 14, or 15 times), or combinations thereof, and the like. Linkers can also comprise the sequence Gly(Ser)₄ (SEQ ID NO:138) or (Gly)₄Ser (SEQ ID NO:139), either of which may be repeated from 1 to 10 times (e.g., 1, 2, 3, 4, 5, 6, 7, 8, 9, or 10 times). In an embodiment, the linker comprises the X1-X2-X3-X₄-X5 where X1-X5 are selected from glycine and serine, and one of which may be a leucine, cysteine, methionine or alanine (SEQ ID NO:140). In one embodiment the linker comprises the aa sequence AAAGG (SEQ ID NO:532), which may be repeated from 1 to 10 times.

[0484] In some cases, a linker polypeptide, present in a T-Cell-MP includes a cysteine residue that can form a disulfide bond with a cysteine residue present in another T-Cell-MP or act as a chemical conjugation site for the coupling of an epitope (e.g., via reaction with a maleimide). In some cases, for example, the linker comprises Gly, Ser and a single Cys, such as in the aa sequence GCGGS(G₄S) (SEQ ID NO:141) where the G₄S unit may be repeated from 1 to 10 times (e.g., repeated 1, 2, 3, 4, 5, 6, 7, 8, 9, or 10 times), G [symbol] GASGGGGSGGGGS (SEQ ID NO:142), G [symbol] GGSGGGGSGGGGSGGGGS (SEQ ID NO:143) or G [symbol] GGSGGGGSGGGGS (SEQ ID NO:144).

[0485] A linker may comprise the aa sequence (GGGGS) (SEQ ID NO:139, also be represented as Gly₄ Ser or G₄S), which may be repeated from 1 to 10 times (e.g., 1, 2, 3, 4, 5, 6, 7, 8, 9, or 10 times). In some embodiments a linker comprising G₄S repeats has one glycine or serine residue replaced by a leucine or methionine. A first T-Cell-MP comprising a Gly₄ Ser containing linker polypeptide that includes a cysteine residue may, when duplexed with a second T-Cell-MP, form a disulfide bond with a cysteine residue present in the second T-Cell-MP of the duplex T-Cell-MP. Such cysteine residues present in linkers (particularly the L3 linker) may also be utilized as a chemical conjugation site for the attachment of an epitope (e.g., a peptide epitope), such as by reaction with a maleimide functionality that is part of, or indirectly connected by a linker to, the epitope. In some cases, for example, the linker comprises the aa sequence GCGGS(G₄S) (SEQ ID NO:141) where the G₄S unit may be repeated from 1 to 10 times (e.g., repeated 1, 2, 3, 4, 5, 6, 7, 8, 9, or 10 times), G [symbol] GASGGGGSGGGGS (SEQ ID NO:142), the sequence G [symbol] GGSGGGGSGGGGSGGGGS (SEQ ID NO:143) or the sequence GCGGSGGGGSGGGGS (SEQ ID NO:144). Non-peptide linkers that may be used to covalently attach epitopes, targeting sequences and/or payloads (e.g., a drug or labeling agent) to a T-Cell-MP (including its peptide linkers) may take a variety of forms, including, but not limited to, alkyl, poly(ethylene glycol), disulfide groups, thioether groups, acid labile groups, photolabile groups, peptidase labile groups, and esterase labile groups. The non-peptide linkers (or “crosslinkers”) may also be, for example, homobifunctional or heterobifunctional linkers that comprise reactive end groups such as N-hydroxysuccinimide esters, maleimide, iodoacetate esters, and the like. Examples of suitable cross-linkers include: N-succinimidyl-[(N-maleimidopropionamido)-tetraethyleneglycol]ester (NHS-PEG4-maleimide); N-succinimidyl 4-(2-pyridyldithio)butanoate (SPDB); N-succinimidyl 4-(2-pyridyldithio)2-sulfobutanoate (sulfo-SPDB); N-succinimidyl 4-(2-pyridyldithio) pentanoate (SPP); N-succinimidyl-4-(N-maleimidomethyl)-cyclohexane-1-carboxy-(6-amidocaproate) (LC-SMCC); K-maleimidoundecanoic acid N-succinimidyl ester (KMUA); γ-maleimide butyric acid N-succinimidyl ester (GMBS); ε-maleimidocaproic acid N-hydroxysuccinimide ester (EMCS); m-maleimide benzoyl-N-hydroxysuccinimide ester (MBS); N-(α-maleimidoacetoxy)-succinimide ester (AMAS); succinimidyl-6-(β-maleimidopropionamide)hexanoate (SMPH); N-succinimidyl 4-(p-maleimidophenyl)butyrate (SMPB); N-(p-maleimidophenyl)isocyanate (PMPI); N-succinimidyl 4(2-pyridylthio)pentanoate (SPP); N-succinimidyl(4-iodo-acetyl)aminobenzoate (SIAB); 6-maleimidocaproyl (MC); maleimidopropanoyl (MP); p-aminobenzyloxycarbonyl (PAB); N-succinimidyl 4-(maleimidomethyl)cyclohexanecarboxylate (SMCC); N-succinimidyl-4-(N-maleimidomethyl)-cyclohexane-1-carboxy-(6-amidocaproate), a “long chain” analog of SMCC (LC-SMCC); 3-maleimidopropanoic acid N-succinimidyl ester (BMPS); N-succinimidyl iodoacetate (SIA); N-succinimidyl bromoacetate (SBA); and N-succinimidyl 3-(bromoacetamido)propionate (SBAP).

### 7 Additional Polypeptide Sequences

[0486] A polypeptide chain of a T-Cell-MP can include one or more polypeptides in addition to those described above. Suitable additional polypeptides include epitope tags, affinity domains, and fluorescent protein sequences (e.g., green fluorescent protein). The one or more additional polypeptide(s) can be included as part of a polypeptide translated by cell or cell-free system at the N-terminus of a polypeptide chain of a multimeric polypeptide, at the C-terminus of a polypeptide chain of a multimeric polypeptide, or internally within a polypeptide chain of a multimeric polypeptide.

[0487] a. Epitope Tags and Affinity Domains

[0488] Suitable epitope tags include, but are not limited to, hemagglutinin (HA; e.g., YPYDVPDYA (SEQ ID NO:145)); c-myc (e.g., EQKLISEEDL; SEQ ID NO:146)), and the like.

[0489] Affinity domains include peptide sequences that can interact with a binding partner, e.g., such as one immobilized on a solid support, useful for identification or purification. DNA sequences encoding multiple consecutive single amino acids, such as histidine, when fused to the expressed protein, may be used for one-step purification of the recombinant protein by high affinity binding to a resin column, such as nickel SEPHAROSE®. Exemplary affinity domains include His5 (HHHHH) (SEQ ID NO:147), HisX6 (HHHHHH) (SEQ ID NO:148), C-myc (EQKLISEEDL) (SEQ ID NO:146), Flag (DYKDDDDK) (SEQ ID NO:149, StrepTag (WSHPQFEK) (SEQ ID NO:150), hemagglutinin (e.g., HA Tag (YPYDVPDYA) (SEQ ID NO:145)), glutathione-S-transferase (GST), thioredoxin, cellulose binding domain, RYIRS (SEQ ID NO:151), Phe-His-His-Thr (SEQ ID NO:152), chitin binding domain, S-peptide, T7 peptide, SH2 domain, C-end RNA tag, WEAAAREACCRECCARA (SEQ ID NO:153), metal binding domains (e.g., zinc binding domains or calcium binding domains such as those from calcium-binding proteins such as calmodulin, troponin C, calcineurin B, myosin light chain, recoverin, S-modulin, visinin, VILIP, neurocalcin, hippocalcin, frequenin, caltractin, calpain large-subunit, 5100 proteins, parvalbumin, calbindin D9K, calbindin D28K, and calretinin), inteins, biotin, streptavidin, MyoD, Id, leucine zipper sequences, and maltose binding protein.

[0490] b. Targeting Sequences

[0491] T-Cell-MPs of the present disclosure may include one or more targeting polypeptide sequence(s) or “targeting sequence(s).” Targeting sequences may be located anywhere within the T-Cell-MP polypeptide, for example within, at, or near the carboxyl terminal end of a scaffold peptide (e.g., translated with the scaffold in place of a C-terminal MOD in FIG. 5 or 6 or attached to an L5 linker). Alternatively, a targeting sequence, such as an antibody antigen-binding fragment (Fab), may be covalently or non-covalently attached to a T-Cell-MP. Covalent attachment of a targeting sequence may be made at a chemical conjugation site (e.g., a chemical conjugation site in a scaffold polypeptide), where the targeting sequence effectively becomes a payload-like molecule attached to the T-Cell-MP. Targeting sequences may also be non-covalently bound to a T-Cell-MP (e.g., a T-Cell-MP having a biotin labeled scaffold may be non-covalently attached to an avidin labeled targeting antibody or Fab directed to a cancer antigen). A bispecific antibody (e.g., a bispecific IgG or humanized antibody) having a first antigen binding site directed to a part of the T-Cell-MP (e.g., the scaffold) may also be employed to non-covalently attach a T-Cell-MP to a targeting sequence (the second bispecific antibody binding site) directed to a target (e.g., a cancer antigen). Targeting sequences serve to bind or “localize” T-Cell-MPs to cells and/or tissues displaying the protein (or other molecule) to which the targeting sequence binds. A targeting sequence may be an antibody or antigen binding fragment thereof. A targeting sequence may also be a single-chain T cell receptor (scTCR).

[0492] (i) Targets

[0493] A targeting sequence present in a T-Cell-MP of the present disclosure may target an antigen of an infecting organism and/or infected cell. In one instance, a targeting sequence may be an antibody or a polypeptide encompassing antigen binding fragment of an antibody. Targeting sequences may, for example, be directed to proteins/epitopes of infectious agents, such as viruses, bacteria, fungi, protozoans, and helminths, including those proteins/epitopes of infectious agents that are expressed on cell surfaces. By way of example, cells infected with HPV may express E6 or E7 proteins or portions thereof to which the targeting sequence may be directed. A targeting sequence may also be a Cancer Targeting Polypeptide, or “CTP” that is specific for a cancer associated antigen (“CAA”), such as an antigen associated with a non-solid cancer (e.g., a leukemia) and/or solid tumor-associated antigen. In one instance, the targeting sequence is specific for a cancer-associated peptide/HLA (pHLA) complex on the surface of a cancer cell, where the peptide can be a cancer-associated peptide (e.g., a peptide fragment of a cancer-associated antigen). T-Cell-MPs of the present disclosure can be targeted to cancer cells using targeting sequences that bind a CAA that is present on a cancer cell or presented as a peptide in the context of an HLA protein

[0494] (a) Cancer Associated Antigens (CAAs)

[0495] CAAs that can be targeted with a CTP present in a T-Cell-MP or a higher order T-Cell-MP complex, such as a duplex T-Cell-MP, of the present disclosure include, e.g., NY-ESO (New York Esophageal Squamous Cell Carcinoma 1), MART-1 (melanoma antigen recognized by T cells 1, also known as Melan-A), HPV (human papilloma virus) E6, BCMA (B-cell maturation antigen), CD123, CD133, CD171, CD19, CD20, CD22, CD30, CD33, CEA (carcinoembryonic antigen), EGFR (epidermal growth factor receptor), EGFRvIII (epidermal growth factor receptor variant III), EpCAM (epithelial cell adhesion molecule), EphA2 (ephrin type-A receptor 2), disialoganglioside GD2, GPC3 (glypican-3), HER2, IL13Ralpha2 (Interleukin 13 receptor subunit alpha-2), LeY (a difucosylated type 2 blood group-related antigen), melanoma-associated antigen (also known as melanoma-associated antigen gene product or MAGE) A3 (MAGE A3), melanoma glycoprotein, mesothelin, MUC1 (mucin 1), MUC16 (mucin 16), myelin, NKG2D (Natural Killer Group 2D) ligands, PSMA (prostate-specific membrane antigen), and ROR1 (type I receptor tyrosine kinase like orphan receptor).

[0496] CAAs that can be targeted with a CTP present in a T-Cell-MP also include, but are not limited to, 17-1A-antigen, alpha-fetoprotein (AFP), alpha-actinin-4, A3, antigen specific for A33 antibody, ART-4, B7, Ba 733, BAGE, bcl-2, bcl-6, BCMA, BrE3-antigen, CA125, CAMEL, CAP-1, carbonic anhydrase IX (CAIX), CASP-8/m, CCL19, CCL21, CD1, CD1a, CD2, CD3, CD4, CD5, CD8, CD11A, CD14, CD15, CD16, CD18, CD19, CD20, CD21, CD22, CD23, CD25, CD28, CD29, CD30, CD32b, CD33, CD37, CD38, CD40, CD40L, CD44, CD45, CD46, CD52, CD54, CD55, CD59, CD64, CD66a-e, CD67, CD70, CD70L, CD74, CD79a, CD79b, CD80, CD83, CD95, CD123, CD126, CD132, CD133, CD138, CD147, CD154, CD171, CDC27, CDK-4/m, CDKN2A, CEA, CEACAM5, CEACAM6, claudin (e.g., claudin-1, claudin-10, claudin-18 (e.g., claudin-18, isoform 2)), complement factors (such as C3, C3a, C3b, C5a and C5), colon-specific antigen-p (CSAp), c-Met, CTLA-4, CXCR4, CXCR7, CXCL12, DAM, Dickkopf-related protein (DKK), ED-B fibronectin, epidermal growth factor receptor (EGFR), EGFRvIII, EGP-1 (TROP-2), EGP-2, ELF2-M, Ep-CAM, EphA2, EphA3, fibroblast activation protein (FAP), fibroblast growth factor (FGF), Flt-1, Flt-3, folate binding protein, folate receptor, G250 antigen, gangliosides (such as GC2, GD3 and GM2), GAGE, GD2, gp100, GPC3, GRO-13, HLA-DR, HM1.24, human chorionic gonadotropin (HCG) and its subunits, HER2, HER3, HMGB-1, hypoxia inducible factor (HIF-1), HIF-1a, HSP70-2M, HST-2, Ia, IFN-gamma, IFN-alpha, IFN-beta, IFN-X, IL-4R, IL-6R, IL-13R, IL13Ralpha2, IL-15R, IL-17R, IL-18R, IL-2, IL-6, IL-8, IL-12, IL-15, IL-17, IL-18, IL-23, IL-25, ILGF, ILGF-1R, insulin-like growth factor-1 (IGF-1), IGF-1R, integrin αVβ3, integrin α5β1, KC4-antigen, killer-cell immunoglobulin-like receptor (KIR), Kras, KS-1-antigen, KS1-4, LDR/FUT, Legamma, macrophage migration inhibitory factor (MIF), MAGE, MAGE-3, MART-1, MART-2, mCRP, MCP-1, melanoma glycoprotein, mesothelin, MIP-1A, MIP-1B, MIF, mucins (such as MUC1, MUC2, MUC3, MUC4, MUC5ac, MUC13, MUC16, MUM-1/2 and MUM-3), NCA66, NCA95, NCA90, Nectin-4, NY-ESO-1, PAM4 antigen, pancreatic cancer mucin, PD-1, PD-L1, PD-1 receptor, placental growth factor, p53, PLAGL2, prostatic acid phosphatase (PAP), PSA, PRAME, PSMA, P1GF, RSS, RANTES, SAGE, 5100, survivin, survivin-2B, T101, TAC, TAG-72, tenascin, Thomson-Friedenreich antigens, Tn antigen, TNF-alpha, tumor necrosis antigens, TRAG-3, TRAIL receptors, vascular endothelial growth factor (VEGF), VEGF receptor (VEGFR) and WT-1.

[0497] A CAA targeted with a CTP of a T-Cell-MP may be an antigen associated with a hematological cancer. Examples of such antigens include, but are not limited to, BCMA, C5, CD19, CD20, CD22, CD25, CD30, CD33, CD38, CD40, CD45, CD52, CD56, CD66, CD74, CD79a, CD79b, CD80, CD138, CTLA-4, CXCR4, DKK, EphA3, GM2, HLA-DR beta, integrin αVβ3, IGF-R1, IL6, KIR, PD-1, PD-L1, TRAILR1, TRAILR2, transferrin receptor, and VEGF. In some cases, the CAA is an antigen expressed by malignant B cells, such as CD19, CD20, CD22, CD25, CD38, CD40, CD45, CD74, CD80, CTLA-4, IGF-R1, IL6, PD-1, TRAILR2, or VEGF.

[0498] A CAA targeted with a CTP of a T-Cell-MP may be associated with a solid tumor. Examples of such antigens include, but are not limited to, CAIX, cadherins, CEA, c-MET, CTLA-4, EGFR family members, EpCAM, EphA3, FAP, folate-binding protein, FR-alpha, gangliosides (such as GC2, GD3 and GM2), HER2, HER3, IGF-1R, integrin αVβ3, integrin α5β1, Legamma, Liv1, mesothelin, mucins, NaPi2b, PD-1, PD-L1, PD-1 receptor, pgA33, PSMA, RANKL, ROR1, TAG-72, tenascin, TRAILR1, TRAILR2, VEGF, VEGFR, and others listed above.

[0499] (b) Peptide/HLA Complexes

[0500] In some cases, a CTP of a T-Cell-MP or a higher order T-Cell-MP complex, such as a duplex T-Cell-MP, targets a peptide/HLA (pHLA) complex on the surface of a cancer cell, where the peptide is a cancer-associated peptide (e.g., a peptide fragment of a cancer-associated antigen). Cancer-associated peptide antigens are known in the art. In some cases, a cancer-associated peptide is bound to a HLA complex comprising an HLA-A*0201 heavy chain and a β2M polypeptide.

[0501] In some cases, the CAA peptide epitope present in the pHLA on the surface of a cancer cell is bound to an HLA complex comprising an HLA heavy chain such as HLA-A*0101, A*0201, A*0301, A*1101, A*2301, A*2402, A*2407, A*3303, and/or A*3401. In some cases, the peptide epitope present in the pHLA on the surface of a cancer cell is bound to an HLA complex comprising an HLA heavy chain such as HLA-B*0702, B*0801, B*1502, B*3802, B*4001, B*4601, and/or B*5301. In some cases, the peptide epitope present in the pHLA on the surface of a cancer cell is bound to an HLA complex comprising an HLA heavy chain such as C*0102, C*0303, C*0304, C*0401, C*0602, C*0701, C*702, C*0801, and/or C*1502.

[0502] In some cases, a CAA peptide is a peptide of from about 4 aas (aa) to about 20 aa (e.g., 4 aa to 5 aa, 6 aa to 8 aa, 9aa to 11 aa, 12 aa to 16 aa, or 16 aa to 20 aa) in length of any one of the following cancer-associated antigens: a CD28 polypeptide, a MUC1 polypeptide, an LMP2 polypeptide, an epidermal growth factor receptor (EGFR) vIII polypeptide, a HER-2/neu polypeptide, a melanoma antigen family A, 3 (MAGE A3) polypeptide, a p53 polypeptide, a mutant p53 polypeptide, an NY-ESO-1 polypeptide, a folate hydrolase (prostate-specific membrane antigen; PSMA) polypeptide, a carcinoembryonic antigen (CEA) polypeptide, a claudin polypeptide (e.g., claudin-1, claudin-10, claudin-18 (e.g., claudin-18, isoform 2)), a Nectin-4 polypeptide, a melanoma antigen recognized by T cells (melanA/MART1) polypeptide, a Ras polypeptide, a gp100 polypeptide, a proteinase3 (PR1) polypeptide, a bcr-abl polypeptide, a tyrosinase polypeptide, a survivin polypeptide, a prostate specific antigen (PSA) polypeptide, an hTERT polypeptide, a sarcoma translocation breakpoints polypeptide, a synovial sarcoma X (SSX) breakpoint polypeptide, an EphA2 polypeptide, an acid phosphatase, prostate (PAP) polypeptide, a melanoma inhibitor of apoptosis (ML-IAP) polypeptide, an epithelial cell adhesion molecule (EpCAM) polypeptide, an ERG (TMPRSS2 ETS fusion) polypeptide, a NA17 polypeptide, a paired-box-3 (PAX3) polypeptide, an anaplastic lymphoma kinase (ALK) polypeptide, an androgen receptor polypeptide, a cyclin B1 polypeptide, an N-myc proto-oncogene (MYCN) polypeptide, a Ras homolog gene family member C (RhoC) polypeptide, a tyrosinase-related protein-2 (TRP-2) polypeptide, a mesothelin polypeptide, a prostate stem cell antigen (PSCA) polypeptide, a melanoma associated antigen-1 (MAGE A1) polypeptide, a cytochrome P450 1B1 (CYP1B1) polypeptide, a placenta-specific protein 1 (PLAC1) polypeptide, a BORIS polypeptide (also known as CCCTC-binding factor or CTCF), an ETV6-AML polypeptide, a breast cancer antigen NY-BR-1 polypeptide (also referred to as ankyrin repeat domain-containing protein 30A), a regulator of G-protein signaling (RGSS) polypeptide, a squamous cell carcinoma antigen recognized by T cells (SART3) polypeptide, a carbonic anhydrase IX polypeptide, a paired box-5 (PAX5) polypeptide, an OY-TES1 (testis antigen; also known as acrosin binding protein) polypeptide, a sperm protein 17 polypeptide, a lymphocyte cell-specific protein-tyrosine kinase (LCK) polypeptide, a high molecular weight melanoma associated antigen (HMW-MAA), an A-kinase anchoring protein-4 (AKAP-4), a synovial sarcoma X breakpoint 2 (SSX2) polypeptide, an X antigen family member 1 (XAGE1) polypeptide, a B7 homolog 3 (B7H3; also known as CD276) polypeptide, a legumain polypeptide (LGMN1; also known as asparaginyl endopeptidase), a tyrosine kinase with Ig and EGF homology domains-2 (Tie-2; also known as angiopoietin-1 receptor) polypeptide, a P antigen family member 4 (PAGE4) polypeptide, a vascular endothelial growth factor receptor 2 (VEGF2) polypeptide, a MAD-CT-1 polypeptide, a fibroblast activation protein (FAP) polypeptide, a platelet derived growth factor receptor beta (PDGFI3) polypeptide, a melanoma cancer testis antigen-2 (MAD-CT-2) polypeptide, a Fos-related antigen-1 (FOSL) polypeptide; a human papilloma virus (HPV) antigen; an alpha-feto protein (AFP) antigen; and a Wilms tumor-1 (WT1) antigen.

[0503] For example, a CTP present in a T-Cell-MP may bind to: a) a WT-1 peptide bound to an HLA complex comprising an HLA heavy chain (e.g., an HLA-A*0201 heavy chain or an HLA-A*2402 heavy chain) and a β2M polypeptide; b) an HPV peptide bound to an HLA complex comprising a class I HLA heavy chain and a β2M polypeptide; c) a mesothelin peptide bound to an HLA complex comprising a class I HLA heavy chain and a β2M polypeptide; d) a Her2 peptide bound to an HLA complex comprising a class I HLA heavy chain and a β2M polypeptide; or e) a BCMA peptide bound to an HLA complex comprising a class I HLA heavy chain and a β2M polypeptide.

[0504] A CAA peptide may comprise from about 4 aas (aa) to about 20 aa (e.g., 4 aa, 5 aa, 6 aa, 7 aa, 8 aa, 9 aa, 10 aa, 11 aa, 12 aa, 13 aa, 14 aa, 15 aa, 16 aa, 17 aa, 18 aa, 19 aa, or 20 aa) in length of a mesothelin polypeptide having at least 90%, at least 95%, at least 98%, at least 99%, or 100%, aa sequence identity to the following mesothelin aa sequence: LAGE TGQEAAPLDG VLANPPNISS LSPRQLLGFP CAEVSGLSTE RVRELAVALA QKNVKLSTEQ LRCLAHRLSE PPEDLDALPL DLLLFLNPDA FSGPQACTRF FSRITKANVD LLPRGAPERQ RLLPAALACW GVRGSLLSEA DVRALGGLAC DLPGRFVAES AEVLLPRLVS CPGPLDQDQQ EAARAALQGG GPPYGPPSTW SVSTMDALRG LLPVLGQPII RSIPQGIVAA WRQRSSRDPS WRQPERTILR PRFRREVEKT ACPSGKKARE IDESLIFYKK WELEACVDAA LLATQMDRVN AIPFTYEQLD VLKHKLDELY PQGYPESVIQ HLGYLFLKMS PEDIRKWNVT SLETLKALLE VNKGHEMSPQ VATLIDRFVK GRGQLDKDTL DTLTAFYPGY LCSLSPEELS SVPPSSIWAV RPQDLDTCDP RQLDVLYPKA RLAFQNMNGS EYFVKIQSFL GGAPTEDLKA LSQQNVSMDL ATFMKLRTDA VLPLTVAEVQ KLLGPHVEGL KAEERHRPVR DWILRQRQDD LDTLGLGLQG GIPNGYLVLD LSMQEALSGT PCLLGPGPVL TVLALLLAST LA (SEQ ID NO:154). For example, a mesothelin peptide present in a pHLA complex can be: i) KLLGPHVEGL (SEQ ID NO:155); ii) AFYPGYLCSL (SEQ ID NO:156), which can bind HLA-A*2402/β2M; iii) VLPLTVAEV (SEQ ID NO:157); iv) ELAVALAQK (SEQ ID NO:158); v) ALQGGGPPY (SEQ ID NO:159); vi) FYPGYLCSL (SEQ ID NO:160); vii) LYPKARLAF (SEQ ID NO:161); viii) LLFLLFSLGWVGPSR (SEQ ID NO:162); ix) VNKGHEMSPQAPRRP (SEQ ID NO:163); x) FMKLRTDAVLPLTVA (SEQ ID NO:164); or xi) DAALLATQMD (SEQ ID NO:165).

[0505] A CAA peptide may comprise from about 4 aas (aa) to about 20 aa (e.g., 4 aa, 5 aa, 6 aa, 7 aa, 8 aa, 9 aa, 10 aa, 11 aa, 12 aa, 13 aa, 14 aa, 15 aa, 16 aa, 17 aa, 18 aa, 19 aa, or 20 aa) in length of a mesothelin polypeptide having at least 90%, at least 95%, at least 98%, at least 99%, or 100%, aa sequence identity to the following Her2 (receptor tyrosine-protein kinase erbB2) aa sequence:

(SEQ ID NO: 166)
MELAALCRWG LLLALLPPGA ASTQVCTGTD MKLRLPASPE
THLDMLRHLY QGCQVVQGNL ELTYLPTNAS LSFLQDIQEV
QGYVLIAHNQ VRQVPLQRLR IVRGTQLFED NYALAVLDNG
DPLNNTTPVT GASPGGLREL QLRSLTEILK GGVLIQRNPQ
LCYQDTILWK DIFHKNNQLA LTLIDTNRSR ACHPCSPMCK
GSRCWGESSE DCQSLTRTVC AGGCARCKGP LPTDCCHEQC
AAGCTGPKHS DCLACLHFNH SGICELHCPA LVTYNTDTFE
SMPNPEGRYT FGASCVTACP YNYLSTDVGS CTLVCPLHNQ
EVTAEDGTQR CEKCSKPCAR VCYGLGMEHL REVRAVTSAN
IQEFAGCKKI FGSLAFLPES FDGDPASNTA PLQPEQLQVF
ETLEEITGYL YISAWPDSLP DLSVFQNLQV IRGRILHNGA
YSLTLQGLGI SWLGLRSLRE LGSGLALIHH NTHLCFVHTV
PWDQLFRNPH QALLHTANRP EDECVGEGLA CHQLCARGHC
WGPGPTQCVN CSQFLRGQEC VEECRVLQGL PREYVNARHC
LPCHPECQPQ NGSVTCFGPE ADQCVACAHY KDPPFCVARC
PSGVKPDLSY MPIWKFPDEE GACQPCPINC THSCVDLDDK
GCPAEQRASP LTSIISAVVG ILLVVVLGVV FGILIKRRQQ
KIRKYTMRRL LQETELVEPL TPSGAMPNQA QMRILKETEL
RKVKVLGSGA FGTVYKGIWI PDGENVKIPV AIKVLRENTS
PKANKEILDE AYVMAGVGSP YVSRLLGICL TSTVQLVTQL
MPYGCLLDHV RENRGRLGSQ DLLNWCMQIA KGMSYLEDVR
LVHRDLAARN VLVKSPNHVK ITDFGLARLL DIDETEYHAD
GGKVPIKWMA LESILRRRFT HQSDVWSYGV TVWELMTFGA
KPYDGIPARE IPDLLEKGER LPQPPICTID VYMIMVKCWM
IDSECRPRFR ELVSEFSRMA RDPQRFVVIQ NEDLGPASPL
DSTFYRSLLE DDDMGDLVDA EEYLVPQQGF FCPDPAPGAG
GMVHHRHRSS STRNM.

[0506] A CAA peptide may comprise a peptide from about 4 aas (aa) to about 20 aa (e.g., 4 aa, 5 aa, 6 aa, 7 aa, 8 aa, 9 aa, 10 aa, 11 aa, 12 aa, 13 aa, 14 aa, 15 aa, 16 aa, 17 aa, 18 aa, 19 aa, or 20 aa) in length of a B-cell maturation protein (BCMP) polypeptide having at least 90%, at least 95%, at least 98%, at least 99%, or 100%, aa sequence identity to a portion of the following BCMA aa sequence:

(SEQ ID NO: 167)
[sequence omitted]

[0507] A CAA peptide may comprise a peptide from about 4 aas (aa) to about 20 aa (e.g., 4 aa, 5 aa, 6 aa, 7 aa, 8 aa, 9 aa, 10 aa, 11 aa, 12 aa, 13 aa, 14 aa, 15 aa, 16 aa, 17 aa, 18 aa, 19 aa, or 20 aa) in length of a mesothelin polypeptide having at least 90%, at least 95%, at least 98%, at least 99%, or 100%, aa sequence identity to the following WT-1 aa sequence: MDFLLLQDPA STCVPEPASQ HTLRSGPGCL QQPEQQGVRD PGGIWAKLGA AEASAERLQG RRSRGASGSE PQQMGSDVRD LNALLPAVPS LGGGGGCALP VSGAAQWAPV LDFAPPGASA YGSLGGPAPP PAPPPPPPPP PHSFIKQEPS WGGAEPHEEQ CLSAFTVHFS GQFTGTAGAC RYGPFGPPPP SQASSGQARM FPNAPYLPSC LESQPAIRNQ GYSTVTFDGT PSYGHTPSHH AAQFPNHSFK HEDPMGQQGS LGEQQYSVPP PVYGCHTPTD SCTGSQALLL RTPYSSDNLY QMTSQLECMT WNQMNLGATL KGHSTGYESD NHTTPILCGA QYRIHTHGVF RGIQDVRRVP GVAPTLVRSA SETSEKRPFM CAYPGCNKRY FKLSHLQMHS RKHTGEKPYQ CDFKDCERRF SRSDQLKRHQ RRHTGVKPFQ CKTCQRKFSR SDHLKTHTRT HTGEKPFSCR WPSCQKKFAR SDELVRHHNM HQRNMTKLQL AL (SEQ ID NO:168).

[0508] Non-limiting examples of WT-1 peptides include RMFPNAPYL (SEQ ID NO:397), CMTWNQMN (SEQ ID NO:403), CYTWNQMNL (SEQ ID NO:400), CMTWNQMNLGATLKG (SEQ ID NO:361), WNQMNLGATLKGVAA (SEQ ID NO:362), CMTWNYMNLGATLKG (SEQ ID NO:363), WNYMNLGATLKGVAA (SEQ ID NO:364), MTWNQMNLGATLKGV (SEQ ID NO:534), TWNQMNLGATLKGVA (SEQ ID NO:366), CMTWNLMNLGATLKG (SEQ ID NO:367), MTWNLMNLGATLKGV (SEQ ID NO:368), TWNLMNLGATLKGVA (SEQ ID NO:369), WNLMNLGATLKGVAA (SEQ ID NO:370), MNLGATLK (SEQ ID NO:371), MTWNYMNLGATLKGV (SEQ ID NO:372), TWNYMNLGATLKGVA (SEQ ID NO:373), CMTWNQMNLGATLKGVA (SEQ ID NO:374), CMTWNLMNLGATLKGVA (SEQ ID NO:375), CMTWNYMNLGATLKGVA (SEQ ID NO:376), GYLRNPTAC (SEQ ID NO:377), GALRNPTAL (SEQ ID NO:378), YALRNPTAC (SEQ ID NO:379), GLLRNPTAC (SEQ ID NO:380), RYRPHPGAL (SEQ ID NO:381), YQRPHPGAL (SEQ ID NO:382), RLRPHPGAL (SEQ ID NO:383), RIRPHPGAL (SEQ ID NO:384), QFPNHSFKHEDPMGQ (SEQ ID NO:385), HSFKHEDPY (SEQ ID NO:386), QFPNHSFKHEDPM (SEQ ID NO:387), QFPNHSFKHEDPY (SEQ ID NO:388), KRPFMCAYPGCNK (SEQ ID NO:389), KRPFMCAYPGCYK (SEQ ID NO:390), FMCAYPGCY (SEQ ID NO:391), FMCAYPGCK (SEQ ID NO:392), KRPFMCAYPGCNKRY (SEQ ID NO:393), SEKRPFMCAY PGCNK (SEQ ID NO:394), KRPFMCAYPGCYKRY (SEQ ID NO:395), NLMNLGATL (SEQ ID NO:359), NYMNLGATL (SEQ ID NO:360), and those WT-1 peptides recited in section I.A.8.d.i.(b).

[0509] In some cases, a CAA peptide is a peptide of from about 4 aas (aa) to about 20 aa (e.g., 4 aa, 5 aa, 6 aa, 7 aa, 8 aa, 9 aa, 10 aa, 11 aa, 12 aa, 13 aa, 14 aa, 15 aa, 16 aa, 17 aa, 18 aa, 19 aa, or 20 aa) in length of an HPV polypeptide having at least 90%, at least 95%, at least 98%, at least 99%, or 100%, aa sequence identity to a human papilloma virus (HPV) peptide. An HPV peptide can be a peptide of an HPV E6 polypeptide or an HPV E7 polypeptide. The HPV epitope can be an epitope of HPV of any of a variety of genotypes, including, e.g., HPV16, HPV18, HPV31, HPV33, HPV35, HPV39, HPV45, HPV51, HPV52, HPV56, HPV58, HPV59, HPV68, HPV73, or HPV82. Non-limiting examples of HPV peptides include: E6 18-26 (KLPQLCTEL; SEQ ID NO:274); E6 26-34 (LQTTIHDII; SEQ ID NO:404); E6 49-57 (VYDFAFRDL; SEQ ID NO:405); E6 52-60 (FAFRDLCIV; SEQ ID NO:406); E6 75-83 (KFYSKISEY; SEQ ID NO:407); E6 80-88 (ISEYRHYCY; SEQ ID NO:408); E7 7-15 (TLHEYMLDL; SEQ ID NO:409); E7 11-19 (YMLDLQPET; SEQ ID NO:276); E7 44-52 (QAEPDRAHY; SEQ ID NO:410); E7 49-57 (RAHYNIVTF (SEQ ID NO:411); E7 61-69 (CDSTLRLCV; SEQ ID NO:412); and E7 67-76 (LCVQSTHVDI; SEQ ID NO:413); E7 82-90 (LLMGTLGIV; SEQ ID NO:414); E7 86-93 (TLGIVCPI; SEQ ID NO:277); E7 92-93 (LLMGTLGIVCPI; SEQ ID NO:415); and those HPV peptides in section I.A.8.d.i.(c).

[0510] In some cases, a CAA peptide is a peptide of a claudin polypeptide having at least 90%, at least 95%, at least 98%, at least 99%, or 100%, amino acid sequence identity to the following claudin-18 (isoform 2) (CLDN 18.2) amino acid sequence: MAVTACQGLG FVVSLIGIAG IIAATCMDQW STQDLYNNPV TAVFNYQGLW RSCVRESSGF TECRGYFTLL GLPAMLQAVR ALMIVGIVLG AIGLLVSIFA LKCIRIGSME DSAKANMTLT SGIMFIVSGL CAIAGVSVFA NMLVTNFWMS TANMYTGMGG MVQTVQTRYT FGAALFVGWV AGGLTLIGGV MMCIACRGLA PEETNYKAVS YHASGHSVAY KPGGFKASTG FGSNTKNKKI YDGGARTEDE VQSYPSKHDY V (SEQ ID NO:169). In some cases, a cancer-associated peptide is a peptide of a claudin polypeptide having the amino acid sequence TEDEVQSYPSKHDYV (SEQ ID NO:170) (and having a length of about 15 amino acids) or EVQSYPSKHDYV (SEQ ID NO:171) (and having a length of about 12 amino acids.

[0511] In some cases, a CAA peptide is a peptide of a trophoblast cell-surface antigen-2 (Trop-2) polypeptide. Trop-2 (also known as epithelial glycoprotein-1, gastrointestinal tumor-associated antigen GA733-1, membrane component chromosome 1 surface marker-1, and tumor-associated calcium signal transducer-2) is a transmembrane glycoprotein that is upregulated in numerous cancer types, and is the protein product of the TACSTD2 gene. In some cases, a cancer-associated peptide is a peptide of a TROP-2 polypeptide having at least 90%, at least 95%, at least 98%, at least 99%, or 100%, amino acid sequence identity to the following TROP-2 amino acid sequence: [sequence omitted] (SEQ ID NO:535).

[0512] (ii) Antibodies

[0513] As noted above, in some cases, a CTP present in a T-Cell-MP or a higher order T-Cell-MP complex, such as a duplex T-Cell-MP, of the present disclosure is an antibody or an antigen binding fragment thereof. In some cases, the CTP is an antibody that is specific for a CAA. In some cases, the CTP is an antibody specific for a peptide on the surface of an infected cell (e.g., viral, bacterial, or mycoplasma). In some cases, the CTP is an antibody specific for a peptide/HLA complex on the surface of a cancer cell, where the peptide can be a cancer-associated peptide (e.g., a peptide fragment of a cancer-associated antigen).

[0514] There are five major classes of immunoglobulins: IgA, IgD, IgE, IgG, and IgM, and several of these classes can be further divided into subclasses (isotypes), e.g., IgG1, IgG2, IgG3, IgG4, IgA, and IgA2. The subclasses can be further divided into types, e.g., IgG2a and IgG2b.

[0515] The term “humanized immunoglobulin” as used herein refers to an immunoglobulin comprising portions of immunoglobulins of different origin, wherein at least one portion comprises amino acid sequences of human origin. Chimeric or CDR-grafted single chain antibodies are also encompassed by the term humanized immunoglobulin.

[0516] The terms “antibodies” and “immunoglobulin” include antibodies or immunoglobulins of any isotype, fragments of antibodies that retain specific binding to antigen, including, but not limited to, Fab, F(ab′)₂, Fv, scFv, and Fd fragments, chimeric antibodies, humanized antibodies, single-chain antibodies (scAb), single domain antibodies (dAb), single domain heavy chain antibodies, a single domain light chain antibodies, nanobodies, bi-specific antibodies, multi-specific antibodies, and fusion proteins comprising an antigen-binding (also referred to herein as antigen binding) portion of an antibody and a non-antibody protein.

[0517] The term “nanobody” (Nb), as used herein, refers to the smallest antigen binding fragment or single variable domain (V_{HH}) derived from naturally occurring heavy chain antibody and is known to the person skilled in the art. They are derived from heavy chain only antibodies, seen in camelids (Hamers-Casterman et al. (1993) Nature 363:446; Desmyter et al. (1996) Nature Structural Biol. 3:803; and Desmyter et al. (2015) Curr. Opin. Struct. Biol. 32:1).

[0518] “Fv” is the minimum antibody fragment that contains a complete antigen-recognition and -binding site. This region consists of a dimer of one heavy- and one light-chain variable domain in tight, non-covalent association.

[0519] “Single-chain Fv” or “sFv” or “scFv” antibody fragments comprise the V_{H} and V_{L} domains of antibody, wherein these domains are present in a single polypeptide chain. In some embodiments, the Fv polypeptide further comprises a polypeptide linker between the VH and VL domains, which enables the sFv to form the desired structure for antigen binding. For a review of sFv, see Pluckthun in The Pharmacology of Monoclonal Antibodies, vol. 113, Rosenburg and Moore eds., Springer-Verlag, New York, pp. 269-315 (1994).

[0520] The term “diabodies” refers to small antibody fragments with two antigen-binding sites, which fragments comprise a heavy-chain variable domain (VH) connected to a light-chain variable domain (VL) in the same polypeptide chain (V_{H}-V_{L}). By using a linker that is too short to allow pairing between the two domains on the same chain, the domains are forced to pair with the complementary domains of another chain and create two antigen-binding sites. Diabodies are described more fully in, for example, EP 404,097; WO 93/11161; and Hollinger et al. (1993) Proc. Natl. Acad. Sci. USA 90:6444-6448.

[0521] As used herein, the term “CDR” or “complementarity determining region” is intended to mean the non-contiguous antigen combining sites found within the variable region of both heavy and light chain polypeptides. CDRs have been described by Kabat et al (1977) J. Biol. Chem. 252:6609; Kabat et al., U.S. Dept. of Health and Human Services, “Sequences of proteins of immunological interest” (1991) (also referred to herein as Kabat 1991); by Chothia et al. (1987) J. Mol. Biol. 196:901 (also referred to herein as Chothia 1987); and MacCallum et al. (1996) J. Mol. Biol. 262:732, where the definitions include overlapping or subsets of amino acid residues when compared against each other. Nevertheless, application of either definition to refer to a CDR of an antibody or grafted antibodies or variants thereof is intended to be within the scope of the term as defined and used herein. The amino acid residues, which encompass the CDRs, as defined by each of the above cited references are set forth in the CDR-table below as a comparison.

### CDR Table

| | Kabat¹ | Chothia² | MacCallum³ |
|---|---|---|---|
| V_{H} CDR-1 | 31-35 | 26-32 | 30-35 |
| V_{H} CDR-2 | 50-65 | 53-55 | 47-58 |
| V_{H} CDR-3 | 95-102 | 96-101 | 93-101 |
| V_{L} CDR-1 | 24-34 | 26-32 | 30-36 |
| V_{L} CDR-2 | 50-56 | 50-52 | 46-55 |
| V_{L} CDR-3 | 89-97 | 91-96 | 89-96 |

¹Residue numbering follows the nomenclature of Kabat et al., 1991, supra
²Residue numbering follows the nomenclature of Chothia et al., supra
³Residue numbering follows the nomenclature of MacCallum et al., supra

[0523] As used herein, the terms “CDR-L1”, “CDR-L2”, and “CDR-L3” refer, respectively, to the first, second, and third CDRs in a light chain variable region. The terms “CDR-L1”, “CDR-L2”, and “CDR-L3” may be used interchangeably with “VL CDR1,” “VL CDR2,” and “VL CDR3,” respectively. As used herein, the terms “CDR-H1”, “CDR-H2”, and “CDR-H3” refer, respectively, to the first, second, and third CDRs in a heavy chain variable region. The terms “CDR-H1”, “CDR-H2”, and “CDR-H3” may be used interchangeably with “VH CDR1,” “VH CDR2,” and “VH CDR3,” respectively. As used herein, the terms “CDR-1”, “CDR-2”, and “CDR-3” refer, respectively, to the first, second and third CDRs of either chain's variable region.

[0524] Non-limiting examples of CAA-targeted antibodies (or antigen binding fragments thereof) that can be included in a T-Cell-MP include, but are not limited to, abituzumab (anti-CD51), LL1 (anti-CD74), LL2 or RFB4 (anti-CD22), veltuzumab (hA20, anti-CD20), rituxumab (anti-CD20), obinutuzumab (GA101, anti-CD20), daratumumab (anti-CD38), lambrolizumab (anti-PD-1 receptor), nivolumab (anti-PD-1 receptor), ipilimumab (anti-CTLA-4), RS7 (anti-TROP-2), PAM4 or KC4 (both anti-mucin), MN-14 (anti-CEA), MN-15 or MN-3 (anti-CEACAM6), Mu-9 (anti-colon-specific antigen-p), Immu 31 (anti-alpha-fetoprotein), R1 (anti-IGF-1R), A19 (anti-CD19), TAG-72 (e.g., CC49), Tn, J591 or HuJ591 (anti-PSMA), AB-PG1-XG1-026 (anti-PSMA dimer), D2/B (anti-PSMA), G250 (anti-carbonic anhydrase IX), L243 (anti-HLA-DR) alemtuzumab (anti-CD52), oportuzumab (anti-EpCAM), bevacizumab (anti-VEGF), cetuximab (anti-EGFR), gemtuzumab (anti-CD33), ibritumomab tiuxetan (anti-CD20); panitumumab (anti-EGFR); tositumomab (anti-CD20); PAM4 (also known as clivatuzumab; anti-mucin), trastuzumab (anti-HER2), pertuzumab (anti-HER2), polatuzumab (anti-CD79b), and anetumab (anti-mesothelin).

[0525] In some cases, a CAA-targeted antibody (or antigen binding fragments thereof) that can be included in a T-Cell-MP is a single-chain antibody. In some cases, a CAA-targeted antibody (or antigen binding fragments thereof) that can be included in a T-Cell-MP is a scFv. In some cases, the tumor-targeting polypeptide is a nanobody (also referred to as a single domain antibody (sdAb)). In some cases, the tumor-targeting polypeptide is a heavy chain nanobody. In some cases, the tumor-targeting polypeptide is a light chain nanobody.

[0526] VH and VL aa sequences of various tumor antigen-binding antibodies are known in the art, as are the light chain and heavy chain CDRs of such antibodies. See, e.g., Ling et al. (2018) Frontiers Immunol. 9:469; WO 2005/012493; US 2019/0119375; US 2013/0066055. The following are non-limiting examples of tumor antigen-binding antibodies.

[0527] (a) Anti-Her2

[0528] An anti-Her2 antibody (or antigen binding fragments thereof) useful as a CTP may comprise: a) a light chain comprising an aa sequence having at least 90%, at least 95%, at least 98%, at least 99%, or 100%, aa sequence identity to the following aa sequence: DIQMTQSPSSLSASVGDRVTITCRASQDVN TAVAWYQQKPGKAPKLLIYSASFLYSGVPSRFSGSRSGTDFTLTISSLQPEDFATYYCQQHYTTPP TFGQGTKVEIKRTVAAPSVFIFPPSDEQLKSGTASVVCLLNNFYPREAKVQWKVDNALQSGNSQ ESVTEQDSKDSTYSLSSTLTLSKADYEKHKVYACEVTHQGLSSPVTKSFNRGEC (SEQ ID NO:172); and b) a heavy chain comprising an aa sequence having at least 90%, at least 95%, at least 98%, at least 99%, or 100%, aa sequence identity to the following aa sequence: EVQLVESGGGLVQPGGSLR LSCAASGFNIKDTYIHWVRQAPGKGLEWVARIYPTNGYTRYADSVKGRFTISADTSKNTAYLQM NSLRAEDTAVYYCSRWGGDGFYAMDYWGQGTLVTVSSASTKGPSVFPLAPSSKSTSGGTAALG CLVKDYFPEPVTVSWNSGALTSGVHTFPAVLQSSGLYSLSSVVTVPSSSLGTQTYICNVNHKPSN TKVDKKVEPKSCDKTHTCPPCPAPELLGGPSVFLFPPKPKDTLMISRTPEVTCVVVDVSHEDPEV KFNWYVDGVEVHNAKTKPREEQYNSTYRVVSVLTVLHQDWLNGKEYKCKVSNKALPAPIEKTI SKAKGQPREPQVYTLPPSREEMTKNQVSLTCLVKGFYPSDIAVEWESNGQPENNYKTTPPVLDS DGSFFLYSKLTVDKSRWQQGNVFSCSVMHEALHNHYTQKSLSLSPGK (SEQ ID NO:173).

[0529] An anti-Her2 antibody (or antigen binding fragments thereof) may comprise a light chain variable region (VL) present in the light chain aa sequence provided above; and a heavy chain variable region (VH) present in the heavy chain aa sequence provided above. For example, an anti-Her2 antibody can comprise: a) a VL comprising an aa sequence having at least 90%, at least 95%, at least 98%, at least 99%, or 100%, aa sequence identity to the aa sequence: [sequence omitted] (SEQ ID NO:174); and b) a VH comprising an aa sequence having at least 90%, at least 95%, at least 98%, at least 99%, or 100%, aa sequence identity to the aa sequence: EVQLVESGGG LVQPGGSLR LSCAASGFNI KDTYIHWVRQ APGKGLEWVA RIYPTNGYTR YADSVKGRFT ISADTSKNTA YLQMNSLRAE DTAVYYCSRW GGDGFYAMDY WGQGTLVTVS S (SEQ ID NO:175). An anti-Her2 antibody may comprise, in order from N-terminus to C-terminus: a) a VH comprising an aa sequence having at least 90%, at least 95%, at least 98%, at least 99%, or 100%, aa sequence identity to the aa sequence: [sequence omitted] (SEQ ID NO:176); b) a linker; and c) a VL comprising an aa sequence having at least 90%, at least 95%, at least 98%, at least 99%, or 100%, aa sequence identity to the aa sequence: [sequence omitted] (SEQ ID NO:177). Suitable linker sequences described elsewhere herein and include, e.g., (GGGGS) (SEQ ID NO:139), which may be repeated from 1 to 10 times (e.g., 1, 2, 3, 4, 5, 6, 7, 8, 9, or 10 times).

[0530] In some cases, an anti-Her2 antibody (or antigen binding fragments thereof) comprises VL CDR1, VL CDR2, and VL CDR3 present in the light chain aa sequence provided above; and VH CDR1, CDR2, and CDR3 present in the heavy chain aa sequence provided above. In some cases, the VH and VL CDRs are as defined by Kabat et al., J. Biol. Chem. 252:6609-6616 (1977); Kabat et al., U.S. Dept. of Health and Human Services, “Sequences of proteins of immunological interest” (1991) (also referred to herein as Kabat 1991. In some cases, the VH and VL CDRs are as defined by Chothia et al., J. Mol. Biol. 196:901-917 (1987) (also referred to herein as Chothia 1987). For example, an anti-Her2 antibody (or antigen binding fragments thereof) can comprise a VL CDR1 having the aa sequence RASQDVNTAVA (SEQ ID NO:179); a VL CDR2 having the aa sequence SASFLY (SEQ ID NO:180); a VL CDR3 having the aa sequence QQHYTTPP (SEQ ID NO:181); a VH CDR1 having the aa sequence GFNIKDTY (SEQ ID NO182); a VH CDR2 having the aa sequence IYPTNGYT (SEQ ID NO:183); and a VH CDR3 having the aa sequence SRWGGDGFYAMDY (SEQ ID NO:184).

[0531] In some cases, an anti-Her2 antibody (or antigen binding fragments thereof) is a scFv antibody. For example, an anti-Her2 scFv can comprise an aa sequence having at least 90%, at least 95%, at least 98%, at least 99%, or 100%, aa sequence identity to the following aa sequence: EVQLVESGGGLVQPG GSLRLSCAASGFNIKDTYIHWVRQAPGKGLEWVARIYPTNGYTRYADSVKGRFTISADTSKNTA YLQMNSLRAEDTAVYYCSRWGGDGFYAMDYWGQGTLVTVSSGGGGSGGGGSGGGGSDIQMT QSPSSLSASVGDRVTITCRASQDVNTAVAWYQQKPGKAPKLLIYSASFLYSGVPSRFSGSRSGTD FTLTISSLQPEDFATYYCQQHYTTPPTFGQGTKVEIK (SEQ ID NO:185).

[0532] As another example, in some cases, an anti-Her2 antibody (or antigen binding fragments thereof) comprises: a) a light chain variable region (VL) comprising an aa sequence having at least 90%, at least 95%, at least 98%, at least 99%, or 100%, aa sequence identity to the following aa sequence: DIQMTQSPSSLSASVGDRVTITCKASQDVSIGVAWYQQKPGKAPKL LIYSASYRYTGVP-SRFSGSGSGTDFTLTISSLQPEDFATYYCQQYYIYPYTFGQGTKVEIKRTVAAPSVFIFPPSDEQLK SGTASVVCLLNNFYPREAKVQWKVDNALQSGNSQESVTEQDSKDSTYSLSSTLTLSKADYEKHK VYACEVTHQGLSSPVTKSFNRGEC (SEQ ID NO:186); and b) a heavy chain variable region (VH) comprising an aa sequence having at least 90%, at least 95%, at least 98%, at least 99%, or 100%, aa sequence identity to the following aa sequence: EVQLVESGGGLVQPGGSLRLSCAASGFTFTDYT MDWVRQAPGKGLEWVADVNPNSGGSIYNQRFKGRFTLSVDRSKNTLYLQMNSLRAEDTAVYY CARNLGPSFYFDYWGQGTLVTVSSASTKGPSVFPLAPSSKSTSGGTAALGCLVKDYFPEPVTVS WNSGALTSGVHTFPAVLQSSGLYSLSSVVTVPSSSLGTQTYICNVNHKPSNTKVDKKVEPKSCDK THTCPPCPAPELLGGPSVFLFPPKPKDTLMISRTPEVTCVVVDVSHEDPEVKFNWYVDGVEVHNA KTKPREEQYNSTYRVVSVLTVLHQDWLNGKEYKCKVSNKALPAPIEKTISKAKGQPREPQVYTL PPSREEMTKNQVSLTCLVKGFYPSDIAVEWESNGQPENNYKTTPPVLDSDGSFFLYSKLTVDKSR WQQGNVFSCSVMHEALHNHYTQKSLSLSPG (SEQ ID NO:187).

[0533] In some cases, an anti-Her2 antibody (or antigen binding fragments thereof) useful as a CTP comprises a VL present in the light chain aa sequence provided above; and a VH present in the heavy chain aa sequence provided above. For example, an anti-Her2 antibody can comprise: a) a VL comprising an aa sequence having at least 90%, at least 95%, at least 98%, at least 99%, or 100%, aa sequence identity to the aa sequence: [sequence omitted] QDVSIGVAWYQQKP GKAPKLLIYSASYRYTGVPSRFSGSGSGTDFTLTISSLQPEDFATYYCQQYYIYPYTFGQGTKVEI K (SEQ ID NO:188); and b) a VH comprising an aa sequence having at least 90%, at least 95%, at least 98%, at least 99%, or 100%, aa sequence identity to the aa sequence: EVQLVESGGGLVQPGGSLRL-SCAASGFTFTDYTMDWVRQAPGKGLEWVADVNPNSGGSIYNQRFKGRFTLSVDRSKNTLYLQM NSLRAEDTAVYYCARNLGPSFYFDYWGQGTLVTVSS (SEQ ID NO:189).

[0534] In some cases, an anti-Her2 antibody (or antigen binding fragments thereof) used as a CTP comprises VL CDR1, VL CDR2, and VL CDR3 present in the light chain aa sequence provided above; and VH CDR1, CDR2, and CDR3 present in the heavy chain aa sequence provided above. In some cases, the VH and VL CDRs are as defined by Kabat (see, e.g., Kabat 1991). In some cases, the VH and VL CDRs are as defined by Chothia (see, e.g., Chothia 1987). For example, an anti-HER2 antibody can comprise a VL CDR1 having the aa sequence KASQDVSIGVA (SEQ ID NO:190); a VL CDR2 having the aa sequence SASYRY (SEQ ID NO:191); a VL CDR3 having the aa sequence QQYYIYPY (SEQ ID NO:192); a VH CDR1 having the aa sequence GFTFTDYTMD (SEQ ID NO:193); a VH CDR2 having the aa sequence ADVNPNSGGSIYNQRFKG (SEQ ID NO:194); and a VH CDR3 having the aa sequence ARNLGPSFYFDY (SEQ ID NO:195).

[0535] In some cases, an anti-Her2 antibody (or antigen binding fragments thereof) is a scFv. For example, in some cases, an anti-Her2 scFv comprises an aa sequence having at least 90%, at least 95%, at least 98%, at least 99%, or 100%, aa sequence identity to the following aa sequence:

(SEQ ID NO: 196)
EVQLVESGGGLVQPGGSLRLSCAASGFNIKDTYIHWVRQAPGKGLEWVA
RIYPTNGYTRYADSVKGRFTISADTSKNTAYLQMNSLRAEDTAVYYCSR
WGGDGFYAMDYWGQGTLVTVSSGGGGSGGGGSGGGGSDIQMTQSPSSLS
ASVGDRVTITCRASQDVNTAVAWYQQKPGKAPKLLIYSASFLYSGVPSR
FSGSRSGTDFTLTISSLQPEDFATYYCQQHYTTPPTFGQGTKVEIK.

[0536] (b) Anti-CD19

[0537] Anti-CD19 antibodies (and antigen binding fragments thereof) useful as a CTP are known in the art; and the VH and VL, or the VH and VL CDRs, of any anti-CD19 antibody can be used in a T-Cell-MP. See e.g., WO 2005/012493.

[0538] An anti-CD19 antibody (or antigen binding fragments thereof) may include a VL CDR1 comprising the aa sequence KASQSVDYDGDSYLN (SEQ ID NO:197); a VL CDR2 comprising the aa sequence DASNLVS (SEQ ID NO:198); and a VL CDR3 comprising the aa sequence QQSTEDPWT (SEQ ID NO:199). An anti-CD19 antibody (or antigen binding fragments thereof) may include a VH CDR1 comprising the aa sequence SYWMN (SEQ ID NO:200); a VH CDR2 comprising the aa sequence QIWPGDGDTNYNGKFKG (SEQ ID NO:201); and a VH CDR3 comprising the aa sequence RETTTVGRYYYAMDY (SEQ ID NO:202). An anti-CD19 antibody may include a VL CDR1 comprising the aa sequence KASQSVDYDGDSYLN (SEQ ID NO:197); a VL CDR2 comprising the aa sequence DASNLVS (SEQ ID NO:198); a VL CDR3 comprising the aa sequence QQSTEDPWT (SEQ ID NO:199); a VH CDR1 comprising the aa sequence SYWMN (SEQ ID NO:200); a VH CDR2 comprising the aa sequence QIWPGDGDTNYNGKFKG (SEQ ID NO:201); and a VH CDR3 comprising the aa sequence RETTTVGRYYYAMDY (SEQ ID NO:202).

[0539] An anti-CD19 antibody (or antigen binding fragments thereof) may be a scFv. For example, an anti-CD19 scFv may comprises an aa sequence having at least 90%, at least 95%, at least 98%, at least 99%, or 100%, aa sequence identity to the following aa sequence: DIQLTQSPAS LAVSLGQRAT ISCKASQSVD YDGDSYLNWY QQIPGQPPKL LIYDASNLVS GIPPRFSGSG SGTDFTLNIH PVEKVDAATY HCQQSTEDPW TFGGGTKLEI KGGGGSGGGG SGGGGSQVQL QQSGAELVRP GSSVKISCKA SGYAFSSYWM NWVKQRPGQG LEWIGQIWPG DGDTNYNGKF KGKATLTADE SSSTAYMQLS SLASEDSAVY FCARRETTTV GRYYYAMDYW GQGTTVTVS (SEQ ID NO:203).

[0540] (c) Anti-Mesothelin

[0541] Anti-mesothelin antibodies (or antigen binding fragments thereof) useful as a CTP are known in the art; and the VH and VL, or the VH and VL CDRs, of any anti-mesothelin antibody can be used in a T-Cell-MP as targeting sequences. See, e.g., U.S. 2019/0000944; WO 2009/045957; WO 2014/031476; U.S. Pat. No. 8,460,660; US 2013/0066055; and WO 2009/068204.

[0542] An anti-mesothelin antibody (or antigen binding fragments thereof) may comprise: a) a light chain comprising an aa sequence having at least 90%, at least 95%, at least 98%, at least 99%, or 100%, aa sequence identity to the following aa sequence: DIALTQPASV SGSPGQSITI SCTGTSSDIG GYNSVSWYQQ HPGKAPKLMI YGVNNRPSGV SNRFSGSKSG NTASLTISGL QAEDEADYYC SSYDIESATP VFGGGTKLTV LGQPKAAPSV TLFPPSSEEL QANKATLVCL ISDFYPGAVT VAWKGDSSPV KAGVETTTPS KQSNNKYAAS SYLSLTPEQW KSHRSYSCQVT HEGSTVEKTV APTESS (SEQ ID NO:204); and b) a heavy chain comprising an aa sequence having at least 90%, at least 95%, at least 98%, at least 99%, or 100%, aa sequence identity to the following aa sequence:

(SEQ ID NO: 205)
QVELVQSGAE VKKPGESLKI SCKGSGYSFT SYWIGWVRQA
PGKGLEWMGI IDPGDSRTRY SPSFQGQVTI SADKSISTAY
LQWSSLKASD TAMYYCARGQ LYGGTYMDGW GQGTLVTVSS
ASTKGPSVFP LAPSSKSTSG GTAALGCLVK DYFPEPVTVS
WNSGALTSG VHTFPAVLQS SGLYSLSSV VTVPSSSLGT
QTYICNVNHK PSNTKVDKKV EPKSCDKTHT CPPCPAPELL
GGPSVFLFPP KPKDTLMISR TPEVTCVVVD VSHEDPEVK
FNWYVDGVEV HNAKTKPRE EQYNSTYRVV SVLTVLHQDW
LNGKEYKCKV SNKALPAPIE KTISKAKGQ PREPQVYTL
PPSRDELTKN QVSLTCLVKG FYPSDIAVE WESNGQPEN
NYKTTPPVL DSDGSFFLYS KLTVDKSRWQQ GNVFSCSVMH
EALHNHYTQ KSLSLSPGK.

[0543] An anti-mesothelin antibody (or antigen binding fragments thereof) may comprise a VL present in the light chain aa sequence provided above; and a VH present in the heavy chain aa sequence provided above. For example, an anti-mesothelin antibody can comprise: a) a VL comprising an aa sequence having at least 90%, at least 95%, at least 98%, at least 99%, or 100%, aa sequence identity to the aa sequence: DIALTQPASVSGSPGQSITISCTGTSSDIGGYNSVSWYQQHPGKAPKLMI-YGVNNRPSGVSNRFSGSKSGNTASLTISGLQAEDEADYYCSSYDIESATPVFGGGTK (SEQ ID NO:206); and b) a VH comprising an aa sequence having at least 90%, at least 95%, at least 98%, at least 99%, or 100%, aa sequence identity to the aa sequence: QVELVQSGAE VKKPGESLKI SCKGSGYSFT SYWIGWVRQ APGKGLEWMG IIDPGDSRTR YSPSFQGQV TISADKSIST AYLQWSSLK ASDTAMYYCA RGQLYGGTYM DGWGQGTLV TVSS (SEQ ID NO:207).

[0544] An anti-mesothelin antibody (or antigen binding fragments thereof) may comprise a VL CDR1, VL CDR2, and VL CDR3 present in the light chain aa sequence provided above; and VH CDR1, CDR2, and CDR3 present in the heavy chain aa sequence provided above. The VH and VL CDRs may be as defined by Kabat (see, e.g., Kabat 1991). In some cases, the VH and VL CDRs are as defined by Chothia (see, e.g., Chothia 1987). For example, an anti-mesothelin antibody (or antigen binding fragments thereof) can comprise a VL CDR1 having the aa sequence TGTSSDIGGYNSVS (SEQ ID NO:208); a VL CDR2 having the aa sequence LMIYGVNNRPS (SEQ ID NO:209); a VL CDR3 having the aa sequence SSYDIESATP (SEQ ID NO:210); a VH CDR1 having the aa sequence GYSFTSYWIG (SEQ ID NO:211); a VH CDR2 having the aa sequence WMGIIDPGDSRTRYSP (SEQ ID NO:212); and a VH CDR3 having the aa sequence GQLYGGTYMDG (SEQ ID NO:213). An anti-mesothelin antibody can be a scFv. As one non-limiting example, an antimesothelin scFv can comprise the following aa sequence: QVQLQQSGAE VKKPGASVKV SCKASGYT FTGYYMHWVR QAPGQGLEWM GRINPNSGGT NYAQKFQGRV TMTRDTSIST AYMELSRLRS EDTAVYYCAR GRYYGMDVWG QGTMVTVSSG GGGSGGGGSG GGGSGGGGSE IVLTQSPATL SLSPGERATI SC [symbol] WYQQRPG QAPRLLIY [symbol] GIPPR FSGSGSGTDF TLTISSLEPE DFAAYYC [symbol] GQG TKVDIK (SEQ ID NO:214), where VH CDR1, CDR2, and CDR3 are underlined; and VL CDR1, CDR2, and CDR3 are bolded and underlined.

[0545] As one non-limiting example, an anti-mesothelin scFv can comprise the following aa sequence: QVQLVQSGAEV KKPGASVKVS CKASGYTFTG YYMHWVRQAP GQGLEWMGWI NPNSGGTNYA QKFQGRVTMT RDTSISTAYM ELSRLRSDDT AVYYCARDLR RTVVTPRAYY GMDVWGQGTT VTVSSGGGGS GGGGSGGGGS GGGGSDIQLT QSPSTLSASV GDRVTITC [symbol] [symbol] W YQQKAGKAPK LLIY [symbol] GVPSRFSGS GSGTDFSFTI SSLQPEDIAT YYC [symbol] TFGQGTKVE IK (SEQ ID NO:215), where VH CDR1, CDR2, and CDR3 are underlined; and VL CDR1, CDR2, and CDR3 are bolded and underlined.

[0546] In some cases, an anti-mesothelin antibody suitable for inclusion in a T-Cell-MP as a targeting sequence comprises: a) VL CDR1, VL CDR2, and VL CDR3 present in a light chain variable region (VL) comprising the following amino acid sequence: EIVLTQSPGTLSLSPGERATLSCRASQSVSSSYLAW YQQKPGQAPRLLIYGASSRATGIPDRFSGSGSGTDFTLTISRLEPEDFAVYYCQQYGSSPIFTFGPG TKVDIK (SEQ ID NO:536); and b) VH CDR1, CDR2, and CDR3 present in a heavy chain variable region (VH) comprising the following amino acid sequence: QMQLVESGGGVVQPGRSLRLSCTASG FTFSNNGMHWVRQAPGKGLEWVAVIWFDGMNKFYVDSVKGRFTISRDNSKNTLYLEMNSLRA EDTAIYYCAREGDGSGIYYYYGMDVWGQGTTVTVSS (SEQ ID NO:537). In some cases, the VH and VL CDRs are as defined by Kabat (see, e.g., the CDR Table above; and Kabat 1991). In some cases, the VH and VL CDRs are as defined by Chothia (see, e.g., the CDR Table above; and Chothia 1987).

[0547] In some cases, an anti-mesothelin antibody suitable for inclusion in a T-Cell-MP as a targeting sequence comprises: a) a VL region comprising an amino acid sequence having at least 90%, at least 95%, at least 98%, at least 99%, or 100%, amino acid sequence identity to the following amino acid sequence: EIVLTQSPGTLSLSPGERATLSCRASQSVSSSYLAWYQQKPGQAPRLLIYGASSRAT GIPDRFSGSGSGTDFTLTISRLEPEDFAVYYCQQYGSSPIFTFGPGTKVDIK (SEQ ID NO:536); and b) a VH region comprising an amino acid sequence having at least 90%, at least 95%, at least 98%, at least 99%, or 100%, amino acid sequence identity to the following amino acid sequence: QMQLVESGG GVVQPGRSLRLSCTASGFTFSNNGMHWVRQAPGKGLEWVAVIWFDGMNKFYVDSVKGRFTISR DNSKNTLYLEMNSLRAEDTAIYYCAREGDGSGIYYYYGMDVWGQGTTVTVSS (SEQ ID NO:537).

[0548] In some cases, an anti-mesothelin antibody suitable for inclusion in a T-Cell-MP as a targeting sequence is a scFv comprising, in order from N-terminus to C-terminus: a) a VH region comprising an amino acid sequence having at least 90%, at least 95%, at least 98%, at least 99%, or 100%, amino acid sequence identity to the following amino acid sequence: QMQLVESGGGVVQPGRSLRLSCTASGFTF SNNGMHWVRQAPGKGLEWVAVIWFDGMNKFYVDSVKGRFTISRDNSKNTLYLEMNSLRAEDT AIYYCAREGDGSGIYYYYGMDVWGQGTTVTVSS (SEQ ID NO:537); b) a peptide linker; and c) a VL region comprising an amino acid sequence having at least 90%, at least 95%, at least 98%, at least 99%, or 100%, amino acid sequence identity to the following amino acid sequence: EIVLTQSPGTLSLSPGERATLSCRASQSVSSSYLAWYQQKPGQAPRLLIYGASSRATGIPDRFSGSG SGTDFTLTISRLEPEDFAVYYCQQYGSSPIFTFGPGTKVDIK (SEQ ID NO:536). In some cases, the peptide linker comprises the amino acid sequence (GGGGS)n, where n is an integer from 1 to 10 (e.g., where n is 1, 2, 3, 4, 5, 6, 7, 8, 9, or 10). In some cases, the peptide linker comprises the amino acid sequence GGGGSGGGGSGGGGS (SEQ ID NO:538) and has a length of 15 amino acids.

[0549] In some cases, an anti-mesothelin antibody suitable for inclusion in a T-Cell-MP as a targeting sequence is a scFv comprising, in order from N-terminus to C-terminus: a) a VL region comprising an amino acid sequence having at least 90%, at least 95%, at least 98%, at least 99%, or 100%, amino acid sequence identity to the following amino acid sequence: EIVLTQSPGTLSLSPGERATLSCRASQSVSS SYLAWYQQKPGQAPRLLIYGASSRATGIPDRFSGSGSGTDFTLTISRLEPEDFAVYYCQQYGSSPI FTFGPGTKVDIK (SEQ ID NO:536); b) a peptide linker; and c) a VH region comprising an amino acid sequence having at least 90%, at least 95%, at least 98%, at least 99%, or 100%, amino acid sequence identity to the following amino acid sequence: QMQLVESGGGVVQPGRSLRLSCTASGFTFSNNGM HWVRQAPGKGLEWVAVIWFDGMNKFYVDSVKGRFTISRDNSKNTLYLEMNSLRAEDTAIYYC AREGDGSGIYYYYGMDVWGQGTTVTVSS (SEQ ID NO:537). In some cases, the peptide linker comprises the amino acid sequence (GGGGS)n, where n is an integer from 1 to 10 (e.g., where n is 1, 2, 3, 4, 5, 6, 7, 8, 9, or 10). In some cases, the peptide linker comprises the amino acid sequence GGGGSGGGGSGGGGS (SEQ ID NO:538) and has a length of 15 amino acids.

[0550] In some cases, an anti-mesothelin antibody suitable for inclusion in a T-Cell-MP as a targeting sequence comprises: a) VL CDR1, VL CDR2, and VL CDR3 present in a light chain variable region (VL) comprising the following amino acid sequence: DIELTQSPAIMSASPGEKVTMTCSASSSVSYMHWYQQKSGTSPKRWIYDTSKLASGVPGRFSGSG SGNSYSLTISSVEAEDDATYYCQQWSKHPLTFGSGTKVEIK (SEQ ID NO:539); and b) VH CDR1, CDR2, and CDR3 present in a heavy chain variable region (VH) comprising the following amino acid sequence: QVQLQQSGPELEKPGASVKISCKASGYSFTGYTMNWVKQSHGKSLEWIGLITPYNG ASSYNQKFRGKATLTVDKSSSTAYMDLLSLTSEDSAVYFCARGGYDGRGFDYWGSGTPVTVSS (SEQ ID NO:540). In some cases, the VH and VL CDRs are as defined by Kabat (see, e.g., the CDR Table above; and Kabat 1991). In some cases, the VH and VL CDRs are as defined by Chothia (see, e.g., the CDR Table above; and Chothia 1987).

[0551] In some cases, an anti-mesothelin antibody suitable for inclusion in a T-Cell-MP as a targeting sequence comprises: a) a VL region comprising an amino acid sequence having at least 90%, at least 95%, at least 98%, at least 99%, or 100%, amino acid sequence identity to the following amino acid sequence: DIELTQSPAIMSASPGEKVTMTCSASSSVSYMHWYQQKSGTSPKRWIYDTSKLASG VPGRFSGSGSGNSYSLTISSVEAEDDATYYCQQWSKHPLTFGSGTKVEIK (SEQ ID NO:539); and b) a VH region comprising an amino acid sequence having at least 90%, at least 95%, at least 98%, at least 99%, or 100%, amino acid sequence identity to the following amino acid sequence: QVQLQQSGPE LEKPGASVKISCKASGYSFTGYTMNWVKQSHGKSLEWIGLITPYNGASSYNQKFRGKATLTVDK SSSTAYMDLLSLTSEDSAVYFCARGGYDGRGFDYWGSGTPVTVSS (SEQ ID NO:540).

[0552] In some cases, an anti-mesothelin antibody suitable for inclusion in a T-Cell-MP as a targeting sequence is a scFv comprising, in order from N-terminus to C-terminus: a) a VL region comprising an amino acid sequence having at least 90%, at least 95%, at least 98%, at least 99%, or 100%, amino acid sequence identity to the following amino acid sequence: DIELTQSPAIMSASPGEKVTMTCSASSSVSYMHWYQQKSGTSPKRWIYDTSKLASGVPGRFSGSG SGNSYSLTISSVEAEDDATYYCQQWSKHPLTFGSGTKVEIK (SEQ ID NO:539); b) a peptide linker; and c) a VH region comprising an amino acid sequence having at least 90%, at least 95%, at least 98%, at least 99%, or 100%, amino acid sequence identity to the following amino acid sequence: QVQLQQSGPELEKPGASVKISCKASGYSFTGYTMNWVKQSHGKSLEWIGLITPYNGASSYNQKF RGKATLTVDKSSSTAYMDLLSLTSEDSAVYFCARGGYDGRGFDYWGSGTPVTVSS (SEQ ID NO:540). In some cases, the peptide linker comprises the amino acid sequence (GGGGS)n, where n is an integer from 1 to 10 (e.g., where n is 1, 2, 3, 4, 5, 6, 7, 8, 9, or 10). In some cases, the peptide linker comprises the amino acid sequence GGGGSGGGGSGGGGS (SEQ ID NO:538) and has a length of 15 amino acids.

[0553] In some cases, an anti-mesothelin antibody suitable for inclusion in a T-Cell-MP as a targeting sequence is a scFv comprising, in order from N-terminus to C-terminus: a) a VH region comprising an amino acid sequence having at least 90%, at least 95%, at least 98%, at least 99%, or 100%, amino acid sequence identity to the following amino acid sequence: QVQLQQSGPELEKPGASVKISCKASGYSFTGYTMNWVKQSHGKSLEWIGLITPYNGASSYNQKF RGKATLTVDKSSSTAYMDLLSLTSEDSAVYFCARGGYDGRGFDYWGSGTPVTVSS (SEQ ID NO:540); b) a peptide linker; and c) a VL region comprising an amino acid sequence having at least 90%, at least 95%, at least 98%, at least 99%, or 100%, amino acid sequence identity to the following amino acid sequence: DIELTQSPAIMSASPGEKVTMTCSASSSVSYMHWYQQKSGTSPKRWIYDTSKLASGVPGRFSGSG SGNSYSLTISSVEAEDDATYYCQQWSKHPLTFGSGTKVEIK (SEQ ID NO:539). In some cases, the peptide linker comprises the amino acid sequence (GGGGS)n, where n is an integer from 1 to 10 (e.g., where n is 1, 2, 3, 4, 5, 6, 7, 8, 9, or 10). In some cases, the peptide linker comprises the amino acid sequence GGGGSGGGGSGGGGS (SEQ ID NO:538) and has a length of 15 amino acids.

[0554] In some cases, an anti-mesothelin antibody suitable for inclusion in a T-Cell-MP as a targeting sequence comprises: a) VL CDR1, VL CDR2, and VL CDR3 present in a light chain variable region (VL) comprising the following amino acid sequence: DIALTQPASVSGSPGQSITISCTGTSSDIGGYNSVSWYQQHPGKAPKLMIYGVNNRPSGVSNRFSG SKSGNTASLTISGLQAEDEADYYCSSYDIESATPVFGGGTKLTVLG (SEQ ID NO:541); and b) VH CDR1, CDR2, and CDR3 present in a heavy chain variable region (VH) comprising the following amino acid sequence: QVELVQSGAEVKKPGESLKISCKGSGYSFTSYWIGWVRQAPGKGLEWMGIIDPG DSRTRYSPSFQGQVTISADKSISTAYLQWSSLKASDTAMYYCARGQLYGGTYMDGWGQGTLVT VSS (SEQ ID NO:542). In some cases, the VH and VL CDRs are as defined by Kabat (see, e.g., the CDR Table, above; and Kabat 1991). In some cases, the VH and VL CDRs are as defined by Chothia (see, e.g., the CDR Table, above; and Chothia 1987).

[0555] In some cases, an anti-mesothelin antibody suitable for inclusion in a T-Cell-MP as a targeting sequence comprises: a) a VL region comprising an amino acid sequence having at least 90%, at least 95%, at least 98%, at least 99%, or 100%, amino acid sequence identity to the following amino acid sequence: DIALTQPASVSGSPGQSITISCTGTSSDIGGYNSVSWYQQHPGKAPKLMIYGVNNRPSGVSNRFSG SKSGNTASLTISGLQAEDEADYYCSSYDIESATPVFGGGTKLTVLG (SEQ ID NO:541); and b) a VH region comprising an amino acid sequence having at least 90%, at least 95%, at least 98%, at least 99%, or 100%, amino acid sequence identity to the following amino acid sequence:

(SEQ ID NO: 542)
QVELVQSGAEVKKPGESLKISCKGSGYSFTSYWIGWVRQAPGKGLEWMG
IIDPGDSRTRYSPSFQGQVTISADKSISTAYLQWSSLKASDTAMYYCAR
GQLYGGTYMDGWGQGTLVTVSS.

[0556] An anti-mesothelin antibody suitable for inclusion in a T-Cell-MP as a targeting sequence is a scFv that may comprise, in order from N-terminus to C-terminus: a) a VL region comprising an amino acid sequence having at least 90%, at least 95%, at least 98%, at least 99%, or 100%, amino acid sequence identity to the following amino acid sequence: DIALTQPASVSGSPGQSITISCTGTSSDIGGYNSVSWYQQHPGKAPKLMIYGVNNRPSGVSNRFSG SKSGNTASLTISGLQAEDEADYYCSSYDIESATPVFGGGTKLTVLG (SEQ ID NO:541); b) a peptide linker; and c) a VH region comprising an amino acid sequence having at least 90%, at least 95%, at least 98%, at least 99%, or 100%, amino acid sequence identity to the following amino acid sequence: QVELVQSGAEVKKPGESLKISCKGSGYSFTSYWIGWVRQAPGKGLEWMGIIDPGDSRTRYSPSFQ GQVTISADKSISTAYLQWSSLKASDTAMYYCARGQLYGGTYMDGWGQGTLVTVSS (SEQ ID NO:542). In some cases, the peptide linker comprises the amino acid sequence (GGGGS)n, where n is an integer from 1 to 10 (e.g., where n is 1, 2, 3, 4, 5, 6, 7, 8, 9, or 10). In some cases, the peptide linker comprises the amino acid sequence GGGGSGGGGSGGGGS (SEQ ID NO:538) and has a length of 15 amino acids.

[0557] An anti-mesothelin antibody suitable for inclusion in a T-Cell-MP as a targeting sequence is a scFv that may comprise in order from N-terminus to C-terminus: a) a VH region comprising an amino acid sequence having at least 90%, at least 95%, at least 98%, at least 99%, or 100%, amino acid sequence identity to the following amino acid sequence: QVELVQSGAEVKKPGESLKISCKGSGYSFTSYWIGWVRQAPGKGLEWMGIIDPGDSRTRYSPSFQ GQVTISADKSISTAYLQWSSLKASDTAMYYCARGQLYGGTYMDGWGQGTLVTVSS (SEQ ID NO:542); b) a peptide linker; and c) a VL region comprising an amino acid sequence having at least 90%, at least 95%, at least 98%, at least 99%, or 100%, amino acid sequence identity to the following amino acid sequence: DIALTQPASVSGSPGQSITISCTGTSSDIGGYNSVSWYQQHPGKAPKLMIYGVNNR PSGVSNRFSGSKSGNTASLTISGLQAEDEADYYCSSYDIESATPVFGGGTKLTVLG (SEQ ID NO:541). In some cases, the peptide linker comprises the amino acid sequence (GGGGS)n, where n is an integer from 1 to 10 (e.g., where n is 1, 2, 3, 4, 5, 6, 7, 8, 9, or 10). In some cases, the peptide linker comprises the amino acid sequence GGGGSGGGGSGGGGS (SEQ ID NO:538) and has a length of 15 amino acids.

[0558] In some cases, an anti-mesothelin antibody suitable for inclusion in a T-Cell-MP comprises: a) VL CDR1, VL CDR2, and VL CDR3 present in a light chain variable region (VL) comprising the following amino acid sequence: DIQMTQSPSSLSASVGDRVTITCSASSSVSYMHWYQQKSGKAPKLLIYDTSKLASGVPSRFSGSGS GTDFTLTISSLQPEDFATYYCQQWSKHPLTFGQGTKLEIK (SEQ ID NO:543); and b) VH CDR1, CDR2, and CDR3 present in a heavy chain variable region (VH) comprising the following amino acid sequence: QVQLVQSGAEVKKPGASVKVSCKASGYSFTGYTMNWVRQAPGQGLEWMGLITPYN GASSYNQKFRGKATMTVDTSTSTVYMELSSLRSEDTAVYYCARGGYDGRGFDYWGQGTLVTV SS (SEQ ID NO:544). In some cases, the VH and VL CDRs are as defined by Kabat (see, e.g., the CDR Table above; and Kabat 1991). In some cases, the VH and VL CDRs are as defined by Chothia (see, e.g., the CDR Table above; and Chothia 1987).

[0559] In some cases, an anti-mesothelin antibody suitable for inclusion in a T-Cell-MP comprises: a) a VL region comprising an amino acid sequence having at least 90%, at least 95%, at least 98%, at least 99%, or 100%, amino acid sequence identity to the following amino acid sequence: DIQMTQSPSSLSA SVGDRVTITCSASSSVSYMHWYQQKSGKAPKLLIYDTSKLASGVPSRFSGSGSGTDFTLT ISSLQPEDFATYYCQQWSKHPLTFGQGTKLEIK (SEQ ID NO:543); and b) a VH region comprising an amino acid sequence having at least 90%, at least 95%, at least 98%, at least 99%, or 100%, amino acid sequence identity to the following amino acid sequence: QVQLVQSGAEVKKPGA SVKVSCKASGYSFTGYTMNWVRQAPGQGLEWMGLITPYNGASSYNQKFRGKATMTV DTSTSTVYMELSSLRSEDTAVYYCARGGYDGRGFDYWGQGTLVTVSS (SEQ ID NO:544).

[0560] In some cases, an anti-mesothelin antibody suitable for inclusion in a T-Cell-MP is a scFv comprising, in order from N-terminus to C-terminus: a) a VL region comprising an amino acid sequence having at least 90%, at least 95%, at least 98%, at least 99%, or 100%, amino acid sequence identity to the following amino acid sequence: DIQMTQSPSSLSASVGDRVTITCSASSSVSYMHWYQQKSGKAPKLLIYDTSKLASGVPSR FSGSGSGTDFTLTISSLQPEDFATYYCQQWSKHPLTFGQGTKLEIK (SEQ ID NO:543); b) a peptide linker; and c) a VH region comprising an amino acid sequence having at least 90%, at least 95%, at least 98%, at least 99%, or 100%, amino acid sequence identity to the following amino acid sequence: QVQLVQSGAEVKKPGASVKVSCKASGYSFTGYTMNWVRQAPGQGLEWMGLITPYNG ASSYNQKFRGKATMTVDTSTSTVYMELSSLRSEDTAVYYCARGGYDGRGFDYWGQGT LVTVSS (SEQ ID NO:544). In some cases, the peptide linker comprises the amino acid sequence (GGGGS)n, where n is an integer from 1 to 10 (e.g., where n is 1, 2, 3, 4, 5, 6, 7, 8, 9, or 10). In some cases, the peptide linker comprises the amino acid sequence GGGGSGGGGSGGGGS (SEQ ID NO:538) and has a length of 15 amino acids.

[0561] In some cases, an anti-mesothelin antibody suitable for inclusion in a T-Cell-MP is a scFv comprising, in order from N-terminus to C-terminus: a) a VH region comprising an amino acid sequence having at least 90%, at least 95%, at least 98%, at least 99%, or 100%, amino acid sequence identity to the following amino acid sequence: QVQLVQSGAEVKKPGASVKVSCKASGYSFTGYTMNWVRQA PGQGLEWMGLITPYNGASSYNQKFRGKATMTVDTSTSTVYMELSSLRSEDTAVYYCARGGYDG RGFDYWGQGTLVTVSS (SEQ ID NO:544); b) a peptide linker; and c) a VL region comprising an amino acid sequence having at least 90%, at least 95%, at least 98%, at least 99%, or 100%, amino acid sequence identity to the following amino acid sequence: DIQMTQSPSSLSASVGDRVTITCSASSSV SYMHWYQQKSGKAPKLLIYDTSKLASGVPSRFSGSGSGTDFTLTISSLQPEDFATYYCQQWSKHP LTFGQGTKLEIK (SEQ ID NO:543). In some cases, the peptide linker comprises the amino acid sequence (GGGGS)n, where n is an integer from 1 to 10 (e.g., where n is 1, 2, 3, 4, 5, 6, 7, 8, 9, or 10). In some cases, the peptide linker comprises the amino acid sequence GGGGSGGGGSGGGGS (SEQ ID NO:538) and has a length of 15 amino acids.

[0562] (d) Anti-TROP-2

[0563] Trophoblast cell surface antigen 2 (Trop-2) (also known as epithelial glycoprotein-1, gastrointestinal tumor-associated antigen GA733-1, membrane component chromosome 1 surface marker-1, and tumor-associated calcium signal transducer-2) is a transmembrane glycoprotein that is upregulated in numerous cancer types, and is the protein product of the TACSTD2 gene.

[0564] In some cases, the CTP of a T-Cell-MP is an anti-TROP-2 scFv or an anti-TROP-2 nanobody comprising VH and VL CDRs present in any one of the amino acid sequences set forth in FIG. 23A-23D. In some cases, the TTP is an anti-TROP-2 scFv comprising an amino acid sequence as set forth in any one of FIG. 23A-23D.

[0565] Anti-TROP-2 antibodies are known in the art; and the VH and VL, or the VH and VL CDRs, of any anti-TROP-2 antibody can be used in a T-Cell-MP of the present disclosure as a tarting sequence. See, e.g., U.S. Pat. No. 7,238,785). In some cases, an anti-TROP-2 antibody comprises: i) light chain CDR sequences CDR1 (KASQDVSIAVA; SEQ ID NO:545); CDR2 (SASYRYT; SEQ ID NO:546); and CDR3 (QQHYITPLT; SEQ ID NO:547); and ii) heavy chain CDR sequences CDR1 (NYGMN; SEQ ID NO:548); CDR2 (WINTYTGEPTYTDDFKG; SEQ ID NO:549); and CDR3 (GGFGSSYWYFDV; SEQ ID NO:550).

[0566] In some cases, an anti-TROP-2 antibody comprises: i) heavy chain CDR sequences CDR1 (TAGMQ; SEQ ID NO:551); CDR2 (WINTHSGVPKYAEDFKG (SEQ ID NO:552); and CDR3 (SGFGSSYWYFDV; SEQ ID NO:553); and ii) light chain CDR sequences CDR1 (KASQDVSTAVA; SEQ ID NO:554); CDR2 (SASYRYT; SEQ ID NO:546); and CDR3 (QQHYITPLT; SEQ ID NO:547).

[0567] In some cases, an anti-TROP2 antibody suitable for inclusion in a T-Cell-MP comprises: a) VL CDR1, VL CDR2, and VL CDR3 present in a light chain variable region (VL) comprising the following amino acid sequence: DIQLTQSPSSLSASVGDRVSITCKASQDVSIAVAWYQQKPGKAPKLLIYSASYRYTGVPDRFSGSG SGTDFTLTISSLQPEDFAVYYCQQHYITPLTFGAGTKVEIK (SEQ ID NO:555); and b) VH CDR1, CDR2, and CDR3 present in a heavy chain variable region (VH) comprising the following amino acid sequence: QVQLQQSGSELKKPGASVKVSCKASGYTFTNYGMNWVKQAPGQGLKWMGWINTY TGEPTYTDDFKGRFAFSLDTSVSTAYLQISSLKADDTAVYFCARGGFGSSYWYFDVWGQGSLVT VSS (SEQ ID NO:556). In some cases, the V_{H} and V_{L} CDRs are as defined by Kabat (see, e.g., the CDR Table, above; and Kabat 1991). In some cases, the V_{H} and V_{L} CDRs are as defined by Chothia (see, e.g., the CDR Table above; and Chothia 1987).

[0568] In some cases, an anti-TROP-2 antibody suitable for inclusion in a T-Cell-MP comprises: a) a VL region comprising an amino acid sequence having at least 90%, at least 95%, at least 98%, at least 99%, or 100%, amino acid sequence identity to the following amino acid sequence: DIQLTQSPSSLSASVGD RVSITCKASQDVSIAVAWYQQKPGKAPKLLIYSASYRYTGVPDRFSGSGSGTDFTLTISSLQPEDF AVYYCQQHYITPLTFGAGTKVEIK (SEQ ID NO:555); and b) a VH region comprising an amino acid sequence having at least 90%, at least 95%, at least 98%, at least 99%, or 100%, amino acid sequence identity to the following amino acid sequence: QVQLQQSGSELKKPGASVKVSCKASGYTFTNYGM NWVKQAPGQGLKWMGWINTYTGEPTYTDDFKGRFAFSLDTSVSTAYLQISSLKADDTAVYFCA RGGFGSSYWYFDVWGQGSLVTVSS (SEQ ID NO:556).

[0569] In some cases, an anti-TROP-2 antibody suitable for inclusion in a T-Cell-MP is a scFv comprising, in order from N-terminus to C-terminus: a) a VL region comprising an amino acid sequence having at least 90%, at least 95%, at least 98%, at least 99%, or 100%, amino acid sequence identity to the following amino acid sequence: DIQLTQSPSSLSASVGDRVSITCKASQDVSIAVAWYQQKPGK APKLLIYSASYRYTGVPDRFSGSGSGTDFTLTISSLQPEDFAVYYCQQHYITPLTFGAGTKVEIK (SEQ ID NO:555); b) a peptide linker; and c) a VH region comprising an amino acid sequence having at least 90%, at least 95%, at least 98%, at least 99%, or 100%, amino acid sequence identity to the following amino acid sequence: QVQLQQSGSELKKPGASVKVSCKASGYTFTNYGMNWVKQAPGQ GLKWMGWINTYTGEPTYTDDFKGRFAFSLDTSVSTAYLQISSLKADDTAVYFCARGGFGSSYW YFDVWGQGSLVTVSS (SEQ ID NO:556). In some cases, the peptide linker comprises the amino acid sequence (GGGGS)n, where n is an integer from 1 to 10 (e.g., where n is 1, 2, 3, 4, 5, 6, 7, 8, 9, or 10). In some cases, the peptide linker comprises the amino acid sequence GGGGSGGGGSGGGGS (SEQ ID NO:538) and has a length of 15 amino acids.

[0570] In some cases, an anti-TROP-2 antibody suitable for inclusion in a T-Cell-MP is a scFv comprising, in order from N-terminus to C-terminus: a) a VH region comprising an amino acid sequence having at least 90%, at least 95%, at least 98%, at least 99%, or 100%, amino acid sequence identity to the following amino acid sequence: QVQLQQSGSELKKPGASVKVSCKASGYTFTNYGMNWVKQ APGQGLKWMGWINTYTGEPTYTDDFKGRFAFSLDTSVSTAYLQISSLKADDTAVYFCARGGFGS SYWYFDVWGQGSLVTVSS (SEQ ID NO:556); b) a peptide linker; and c) a VL region comprising an amino acid sequence having at least 90%, at least 95%, at least 98%, at least 99%, or 100%, amino acid sequence identity to the following amino acid sequence: DIQLTQSPSSLSASVGDRVSITCKASQDVSIAVAWYQQKPGKAPKLLIYSASYRYTGVPDRFSGSG SGTDFTLTISSLQPEDFAVYYCQQHYITPLTFGAGTKVEIK (SEQ ID NO:555). In some cases, the peptide linker comprises the amino acid sequence (GGGGS)n, where n is an integer from 1 to 10 (e.g., where n is 1, 2, 3, 4, 5, 6, 7, 8, 9, or 10). In some cases, the peptide linker comprises the amino acid sequence GGGGSGGGGSGGGGS (SEQ ID NO:538) and has a length of 15 amino acids.

[0571] In some cases, an anti-TROP2 antibody suitable for inclusion in T-Cell-MP comprises: a) VL CDR1, VL CDR2, and VL CDR3 present in a light chain variable region (VL) comprising the following amino acid sequence: DIQMTQSPSSLSASVGDRVTITCKASQDVSTAVAWYQQKPGKAPKLLIYSASYRYTGVPSRFSGS GSGTDFTLTISSLQPEDFAVYYCQQHYITPLTFGQGTKLEIK (SEQ ID NO:557); and b) VH CDR1, CDR2, and CDR3 present in a heavy chain variable region (VH) comprising the following amino acid sequence: QVQLVQSGAEVKKPGASVKVSCKASGYTFTTAGMQWVRQAPGQGLEWMGWINTHSGVPKYA EDFKGRVTISADTSTSTAYLQLSSLKSEDTAVYYCARSGFGSSYWYFDVWGQGTLVTVSS (SEQ ID NO:558). In some cases, the V_{H} and V_{L} CDRs are as defined by Kabat (see, e.g., the CDR Table, above; and Kabat 1991). In some cases, the V_{H} and V_{L} CDRs are as defined by Chothia (see, e.g., the CDR Table, above; and Chothia 1987).

[0572] In some cases, an anti-TROP-2 antibody suitable for inclusion in a T-Cell-MP comprises: a) a VL region comprising an amino acid sequence having at least 90%, at least 95%, at least 98%, at least 99%, or 100%, amino acid sequence identity to the following amino acid sequence: DIQMTQSPSSLSASVGDRVTITCKASQDVSTAVAWYQQKPGKAPKLLIYSASYRYTGVPSRFSGS GSGTDFTLTISSLQPEDFAVYYCQQHYITPLTFGQGTKLEIK (SEQ ID NO:557); and b) a VH region comprising an amino acid sequence having at least 90%, at least 95%, at least 98%, at least 99%, or 100%, amino acid sequence identity to the following amino acid sequence:

(SEQ ID NO: 558)
QVQLVQSGAEVKKPGASVKVSCKASGYTFTTAGMQWVRQAPGQGLEWMG
WINTHSGVPKYAEDFKGRVTISADTSTSTAYLQLSSLKSEDTAVYYCAR
SGFGSSYWYFDVWGQGTLVTVSS.

[0573] In some cases, an anti-TROP-2 antibody suitable for inclusion in a T-Cell-MP is a scFv comprising, in order from N-terminus to C-terminus: a) a VL region comprising an amino acid sequence having at least 90%, at least 95%, at least 98%, at least 99%, or 100%, amino acid sequence identity to the following amino acid sequence: DIQMTQSPSSLSASVGDRVTITCKASQDVSTAVAWYQQKPGKAPKLLIYSASYRYTGVPSRFSGS GSGTDFTLTISSLQPEDFAVYYCQQHYITPLTFGQGTKLEIK (SEQ ID NO:557); b) a peptide linker; and c) a VH region comprising an amino acid sequence having at least 90%, at least 95%, at least 98%, at least 99%, or 100%, amino acid sequence identity to the following amino acid sequence: QVQLVQSGAEVKKPGASVKVSCKASGYTFTTAGMQWVRQAPGQGLEWMGWINTHSGVPKYA EDFKGRVTISADTSTSTAYLQLSSLKSEDTAVYYCARSGFGSSYWYFDVWGQGTLVTVSS (SEQ ID NO:558). In some cases, the peptide linker comprises the amino acid sequence (GGGGS)n, where n is an integer from 1 to 10 (e.g., where n is 1, 2, 3, 4, 5, 6, 7, 8, 9, or 10). In some cases, the peptide linker comprises the amino acid sequence GGGGSGGGGSGGGGS (SEQ ID NO:538) and has a length of 15 amino acids.

[0574] In some cases, an anti-TROP-2 antibody suitable for inclusion in a T-Cell-MP is a scFv comprising, in order from N-terminus to C-terminus: a) a VH region comprising an amino acid sequence having at least 90%, at least 95%, at least 98%, at least 99%, or 100%, amino acid sequence identity to the following amino acid sequence: QVQLVQSGAEVKKPGASVKVSCKASGYTFTTAGMQWVRQAPGQGLEWMGWINTHSGVPKYA EDFKGRVTISADTSTSTAYLQLSSLKSEDTAVYYCARSGFGSSYWYFDVWGQGTLVTVSS (SEQ ID NO:558); b) a peptide linker; and c) a VL region comprising an amino acid sequence having at least 90%, at least 95%, at least 98%, at least 99%, or 100%, amino acid sequence identity to the following amino acid sequence: DIQMTQSPSSLSASVGDRVTITCKASQDVSTAVAWYQQKPGKAPKLLIYSASYRYTGVPSRFSGS GSGTDFTLTISSLQPEDFAVYYCQQHYITPLTFGQGTKLEIK (SEQ ID NO:557). In some cases, the peptide linker comprises the amino acid sequence (GGGGS)n, where n is an integer from 1 to 10 (e.g., where n is 1, 2, 3, 4, 5, 6, 7, 8, 9, or 10). In some cases, the peptide linker comprises the amino acid sequence GGGGSGGGGSGGGGS (SEQ ID NO:538) and has a length of 15 amino acids.

[0575] (e) Anti-BCMA

[0576] Anti-BCMA (B-cell maturation antigen) antibodies (or antigen binding fragments thereof) are known in the art; and the VH and VL, or the VH and VL CDRs, of any anti-BCMA antibody can be used in targeting a T-Cell-MP. See, e.g., WO 2014/089335; and US 2019/0153061.

[0577] An anti-BCMA antibody (or antigen binding fragments thereof) may comprise: a) a light chain comprising an aa sequence having at least 90%, at least 95%, at least 98%, at least 99%, or 100%, aa sequence identity to the following aa sequence: QSVLTQPPSA SGTPGQRVTI SCSGSSSNIGSNTVNWYQQL PGTAPKLLIF NYHQRPSGVP DRFSGSKSGS SASLAISGLQ SEDEADYYCA AWDDSLNGWV FGGGTKLTVL GQPKAAPSVT LFPPSSEELQ ANKATLVCLI SDFYPGAVTV AWKADSSPVK AGVETTTPDS KQSNNKYAAS SYLSLTPEQW KSHRSYSCQV THEGSTVEKT VAPTECS (SEQ ID NO:216); and b) a heavy chain comprising an aa sequence having at least 90%, at least 95%, at least 98%, at least 99%, or 100%, aa sequence identity to the following aa sequence: EVQLVESGGG LVKPGGSLRL SCAASGFTFG DYALSWFRQ APGKGLEWVG VSRSKAYGG TTDYAASVKG RFTISRDDS KSTAYLQMNS LKTEDTAVY YCASSGYSSG WTPFDYWGQG TLVTVSSAST KGPSVFPLAP SSKSTSGGTA ALGCLVKDYF PEPVTVSWNS GALTSGVHTF PAVLQSSGLY SLSSVVTVPS SSLGTQTYIC NVNHKPSNTK VDKKVEPKSC DKTHTCPPCP APELLGGPSV FLFPPKPKDT LMISRTPEVT CVVVDVSHED PEVKFNWYVD GVEVHNAKTK PREEQYNSTY RVVSVLTVLH QDWLNGKEYK CKVSNKALPA PIEKTISKAK GQPREPQVYT LPPSREEMTK NQVSLTCLVK GFYPSDIAVE WESNGQPENN YKTTPPVLDS DGSFFLYSKL TVDKSRWQQG NVFSCSVMHE ALHNHYTQKS LSLSPGK (SEQ ID NO:217).

[0578] An anti-BCMA (or antigen binding fragments thereof) may comprise a VL present in the light chain aa sequence provided above; and a VH present in the heavy chain aa sequence provided above. For example, an anti-BCMA antibody can comprise: a) a VL comprising an aa sequence having at least 90%, at least 95%, at least 98%, at least 99%, or 100%, aa sequence identity to the aa sequence: QSVLTQPPSA SGTPGQRVTI SCSGSSSNIG SNTVNWYQQL PGTAPKLLIF NYHQRPSGVP DRFSGSKSGS SASLAISGLQ SEDEADYYCA AWDDSLNGWV FGGGTKLTVL G (SEQ ID NO:218); and b) a VH comprising an aa sequence having at least 90%, at least 95%, at least 98%, at least 99%, or 100%, aa sequence identity to the aa sequence: EVQLVESGGG LVKPGGSLR LSCAASGFTF GDYALSWFRQ APGKGLEWVG VSRSKAYGGT TDYAASVKGR FTISRDDSKST AYLQMNSLKT EDTAVYYCAS SGYSSGWTPF DYWGQGTLVT VSSASTKGPSV (SEQ ID NO:219).

[0579] In some cases, an anti-BCMA antibody (or antigen binding fragments thereof) comprises VL CDR1, VL CDR2, and VL CDR3 present in the light chain aa sequence provided above; and VH CDR1, CDR2, and CDR3 present in the heavy chain aa sequence provided above. In some cases, the VH and VL CDRs are as defined by Kabat (see, e.g., Kabat 1991). In some cases, the VH and VL CDRs are as defined by Chothia (see, e.g., Chothia 1987).

[0580] For example, an anti-BCMA antibody (or antigen binding fragments thereof) can comprise a VL CDR1 having the aa sequence SSNIGSNT (SEQ ID NO:220), a VL CDR2 having the aa sequence NYH, a VL CDR3 having the aa sequence AAWDDSLNGWV (SEQ ID NO:221)), a VH CDR1 having the aa sequence GFTFGDYA (SEQ ID NO:222), a VH CDR2 having the aa sequence SRSKAYGGTT (SEQ ID NO:223), and a VH CDR3 having the aa sequence ASSGYSSGWTPFDY (SEQ ID NO:224).

[0581] An anti-BCMA antibody can be a scFv. As one non-limiting example, an anti-BCMA scFv can comprise the following aa sequence: QVQLVQSGAE VKKPGSSVKV SCKASGGTFS NYWMHWVRQA PGQGLEWMGA TYRGHSDTYY NQKFKGRVTI TADKSTSTAY MELSSLRSED TAVYYCARGA IYNGYDVLDN WGQGTLVTVS SGGGGSGGGG SDIQMTQSPS SLSASVGDRVT ITCSASQDIS NYLNWYQQKP GKAPKLLIYY TSNLHSGVPS RFSGSGSGT DFTLTISSLQP EDFATYYCQQ YRKLPWTFGQG TKLEIKR (SEQ ID NO:225), or the sequence:

(SEQ ID NO: 564)
QVQLVQSGAEVKKPGSSVKVSCKASGGTFSNYWMHWVRQAPGQGLEWMGAT
YRGHSDTYYNQKFKGRVTITADKSTSTAYMELSSLRSEDTAVYYCARGAIY
NGYDVLDNWGQGTLVTVSSGGGGSGGGGSGGGGSGGGGSDIQMTQSPSSLS
ASVGDRVTITCSASQDISNYLNWYQQKPGKAPKLLIYYTSNLHSGVPSRFS
GSGSGTDFTLTISSLQPEDFATYYCQQYRKLPWTFGQGTKLEIKR.

[0582] As another example, an anti-BCMA scFv can comprise the following aa sequence:

(SEQ ID NO: 226)
DIQMTQSPSS LSASVGDRVT ITCSASQDIS NYLNWYQQKP
GKAPKLLIYY TSNLHSGVPS RFSGSGSGTD FTLTISSLQP
EDFATYYCQQ YRKLPWTFGQ GTKLEIKRGG GGSGGGGSGG
GGSGGGGSQV QLVQSGAEVK KPGSSVKVSC KASGGTFSNY
WMHWVRQAPG QGLEWMGA TYRGHSDTYY NQKFKGRVTI
TADKSTSTAY MELSSLRSED TAVYYCARGA IYNGYDVLDN
WGQGTLVTVS S.

[0583] In some cases, an anti-BCMA antibody can comprise a VL CDR1 having the amino acid sequence SASQDISNYLN (SEQ ID NO:565); a VL CDR2 having the amino acid sequence YTSNLHS (SEQ ID NO:566); a VL CDR3 having the amino acid sequence QQYRKLPWT (SEQ ID NO:567); a VH CDR1 having the amino acid sequence NYWMH (SEQ ID NO:568); a VH CDR2 having the amino acid sequence ATYRGHSDTYYNQKFKG (SEQ ID NO:569); and a VH CDR3 having the amino acid sequence GAIYNGYDVLDN (SEQ ID NO:570).

[0584] In some cases, an anti-BCMA antibody comprises: a) a light chain comprising an amino acid sequence having at least 90%, at least 95%, at least 98%, at least 99%, or 100%, amino acid sequence identity to the following amino acid sequence:

(SEQ ID NO: 571)
DIQMTQSPSSLSASVGDRVTITCSASQDISNYLNWYQQKPGKAPKLLIYYT
SNLHSGVPSRFSGSGSGTDFTLTISSLQPEDFATYYCQQYRKLPWTFGQGT
KLEIKR.

[0585] In some cases, an anti-BCMA antibody comprises: a) a heavy chain comprising an amino acid sequence having at least 90%, at least 95%, at least 98%, at least 99%, or 100%, amino acid sequence identity to the following amino acid sequence:

(SEQ ID NO: 572)
QVQLVQSGAEVKKPGSSVKVSCKASGGTFSNYWMHWVRQAPGQGLEWMGAT
YRGHSDTYYNQKFKGRVTITADKSTSTAYMELSSLRSEDTAVYYCARGAIY
DGYDVLDNWGQGTLVTVSS.

[0586] In some cases, an anti-BCMA antibody (e.g., an antibody referred to in the literature as belantamab) comprises a light chain comprising the amino acid sequence: DIQMTQSPSSLSASVGDRVTITCSASQDISNYLNWYQQKPGKAPKLLIYYTSNLHSGVPSRFSGSG SGTDFTLTISSLQPEDFATYYCQQYRKLPWTFGQGTKLEIKR (SEQ ID NO:571); and a heavy chain comprising the amino acid sequence:

(SEQ ID NO: 572)
QVQLVQSGAEVKKPGSSVKVSCKASGGTFSNYWMHWVRQAPGQGLEWMGAT
YRGHSDTYYNQKFKGRVTITADKSTSTAYMELSSLRSEDTAVYYCARGAIY
DGYDVLDNWGQGTLVTVSS.

[0587] In some cases, the anti-BCMA antibody has a cancer chemotherapeutic agent linked to the antibody. For example, in some cases, the anti-BCMA antibody is GSK2857916 (belantamab-mafodotin), where monomethyl auristatin F (MMAF) is linked via a maleimidocaproyl linker to the anti-BCMA antibody belantamab.

[0588] (f) Anti-MUC1

[0589] In some cases, a targeting sequence present in a T-Cell-MP of the present disclosure is an antibody specific for MUC1. For example, a targeting sequence can be specific for a MUC1 polypeptide present on a cancer cell. In some cases, the targeting sequence is specific for the cleaved form of MUC1; see, e.g., Fessler et al. (2009) Breast Cancer Res. Treat. 118:113. In some cases, the targeting sequence is an antibody specific for a glycosylated MUC1 peptide; see, e.g., Naito et al. (2017) ACS Omega 2:7493; and U.S. Pat. No. 10,017,580.

[0590] As one non-limiting example, a targeting sequence can be a single-chain Fv specific for MUC1. See, e.g., Singh et al. (2007) Mol. Cancer Ther. 6:562; Thie et al. (2011) PLoSOne 6:e15921; Imai et al. (2004) Leukemia 18:676; Posey et al. (2016) Immunity 44:1444; EP3130607; EP3164418; WO 2002/044217; and US 2018/0112007. In some cases, a targeting sequence is a scFv specific for the MUC1 peptide VTSAPDTRPAPGSTAPPAHG (SEQ ID NO:227). In some cases, a targeting sequence is a scFv specific for the MUC1 peptide: SNIKFRPGSVVVQLTLAFREGTINVHDVETQFNQYKTEAASRY (SEQ ID NO:228). In some cases, a targeting sequence is a scFv specific for the MUC1 peptide SVVVQLTLAFREGTINVHDVETQFNQ YKTEAASRY (SEQ ID NO:229). In some cases, a targeting sequence is a scFv specific for the MUC1 peptide LAFREGTINVHDVETQFNQY (SEQ ID NO:230). In some cases, a targeting sequence is a scFv specific for the MUC1 peptide SNIKFRPGSVVVQLTLAAFREGTIN (SEQ ID NO:231).

[0591] As an example, an anti-MUC1 antibody can comprise: a VH CDR1 having the amino acid sequence RYGMS (SEQ ID NO:232); a VH CDR2 having the amino acid sequence TISGGGTYIYYPDSVKG (SEQ ID NO:233); a VH CDR3 having the amino acid sequence DNYGRNYDYGMDY (SEQ ID NO:234); a VL CDR1 having the amino acid sequence SATSSVSYIH (SEQ ID NO:235); a VL CDR2 having the amino acid sequence STSNLAS (SEQ ID NO:236); and a VL CDR3 having the amino acid sequence QQRSSSPFT (SEQ ID NO:237). See, e.g., US 2018/0112007.

[0592] As another example, an anti-MUC1 antibody can comprise a VH CDR1 having the amino acid sequence GYAMS (SEQ ID NO:238); a VH CDR2 having the amino acid sequence TISSGGTYIYYPD SVKG (SEQ ID NO:239); a VH CDR3 having the amino acid sequence LGGDNYYEYFDV (SEQ ID NO:240); a VL CDR1 having the amino acid sequence RASKSVSTSGYSYMH (SEQ ID NO:241); a VL CDR2 having the amino acid sequence LASNLES (SEQ ID NO:242); and a VL CDR3 having the amino acid sequence QHSRELPFT (SEQ ID NO:243). See, e.g., US 2018/0112007.

[0593] As another example, an anti-MUC1 antibody can comprise a VH CDR1 having the amino acid sequence DYAMN (SEQ ID NO:244); a VH CDR2 having the amino acid sequence VISTFSGNINFN QKFKG (SEQ ID NO:245); a VH CDR3 having the amino acid sequence SDYYGPYFDY (SEQ ID NO:246); a VL CDR1 having the amino acid sequence RSSQTIVHSNGNTYLE (SEQ ID NO:247); a VL CDR2 having the amino acid sequence KVSNRFS (SEQ ID NO:248); and a VL CDR3 having the amino acid sequence FQGSHVPFT (SEQ ID NO:249). See, e.g., US 2018/0112007.

[0594] As another example, an anti-MUC1 antibody can comprise a VH CDR1 having the amino acid sequence GYAMS (SEQ ID NO:238); a VH CDR2 having the amino acid sequence TISSGGTYIYYPDSVKG (SEQ ID NO:239); a VH CDR3 having the amino acid sequence LGGDNYYEY (SEQ ID NO:250); a VL CDR1 having the amino acid sequence TASKSVSTSGYSYMH (SEQ ID NO:251); a VL CDR2 having the amino acid sequence LVSNLES (SEQ ID NO:252); and a VL CDR3 having the amino acid sequence QHIRELTRSE (SEQ ID NO:253). See, e.g., US 2018/0112007.

[0595] (g) Anti-MUC16

[0596] In some cases, a targeting sequence present in a T-Cell-MP of the present disclosure is an antibody specific for MUC16 (also known as CA125). See, e.g., Yin et al. (2002) Int. J. Cancer 98:737. For example, a targeting sequence can be specific for a MUC16 polypeptide present on a cancer cell. See, e.g., US 2018/0118848; and US 2018/0112008. In some cases, a MUC16-specific targeting sequence is a scFv. In some cases, a MUC16-specific targeting sequence is a nanobody.

[0597] As one example, an anti-MUC16 antibody can comprise a VH CDR1 having the amino acid sequence GFTFSNYY (SEQ ID NO:254); a VH CDR2 having the amino acid sequence ISGRGSTI (SEQ ID NO:255); a VH CDR3 having the amino acid sequence VKDRGGYSPY (SEQ ID NO:256); a VL CDR1 having the amino acid sequence QSISTY (SEQ ID NO:257); a VL CDR2 having the amino acid sequence TAS; and a VL CDR3 having the amino acid sequence QQSYSTPPIT (SEQ ID NO:258). See, e.g., US 2018/0118848.

[0598] (h) Anti-Claudin-18.2

[0599] In some cases, a targeting sequence present in a T-Cell-MP of the present disclosure is an antibody specific for claudin-18 isoform 2 (“claudin-18.2”). See, e.g., WO 2013/167259. In some cases, a claudin-18.2-specific targeting sequence is a scFv. In some cases, a claudin-18.2-specific targeting sequence is a nanobody. In some cases, a CTP present in a T-Cell-MP of the present disclosure is an antibody specific for TEDEVQSYPSKHDYV (SEQ ID NO:170) or EVQSYPSKHDYV (SEQ ID NO:171).

[0600] As one example, an anti-claudin-18.2 antibody can comprise a VH CDR1 having the amino acid sequence GYTFTDYS (SEQ ID NO:259); a VH CDR2 having the amino acid sequence INTETGVP (SEQ ID NO:260); a VH CDR3 having the amino acid sequence ARRTGFDY (SEQ ID NO:261); a VL CDR1 having the amino acid sequence KNLLHSDGITY (SEQ ID NO:262); a VL CDR2 having the amino acid sequence RVS; and a VL CDR3 having the amino acid sequence VQVLELPFT (SEQ ID NO:263).

[0601] As another example, an anti-claudin-s antibody can comprise a VH CDR1 having the amino acid sequence GFTFSSYA (SEQ ID NO:264); a VH CDR2 having the amino acid sequence ISDGGSYS (SEQ ID NO:265); a VH CDR3 having the amino acid sequence ARDSYYDNSYVRDY (SEQ ID NO:266); a VL CDR1 having the amino acid sequence QDINTF (SEQ ID NO:267); a VL CDR2 having the amino acid sequence RTN; and a VL CDR3 having the amino acid sequence LQYDEFPLT (SEQ ID NO:268).

[0602] (iii) Single-Chain T Cell Receptors

[0603] In some cases, a CTP present in a T-Cell-MP is a scTCR. A CTP can be a scTCR specific for a peptide/HLA complex on the surface of a cancer cell, where the peptide can be a cancer-associated peptide (e.g., a peptide fragment of a cancer-associated antigen) Amino acid sequences of scTCRs specific for cancer-associated peptides bound to an HLA complex are known in the art. See, e.g., US 2019/0135914; US 2019/0062398; and US 2018/0371049.

[0604] A scTCR includes an alpha chain variable region (Vα) and a beta chain variable region (Vβ) covalently linked through a suitable peptide linker sequence. For example, the Vα can be covalently linked to the Vβ through a suitable peptide linker (L) sequence fused to the C-terminus of the Vα and the N-terminus of the Vβ. A scTCR can have the structure Vα-L-Vβ. A scTCR can have the structure Vβ-L-Vα. A scTCR can also comprise a constant domain (also referred to as constant region). In some cases, a scTCR comprises, in order from N-terminus to C-terminus: i) a TCR α chain variable domain polypeptide; ii) a peptide linker; iii) a TCR R chain variable domain polypeptide; and iv) a TCR R chain constant region extracellular domain polypeptide. In some cases, a scTCR comprises, in order from N-terminus to C-terminus: i) a TCR R chain variable domain polypeptide; ii) a peptide linker; iii) a TCR α chain variable domain polypeptide; and iv) a TCR α chain constant region extracellular domain polypeptide.

[0605] Amino acid sequences of scTCRs specific for peptide/HLA complexes, where the peptide is a cancer-associated peptide, are known in the art. See, e.g., US 2019/0135914; US 2019/0062398; US 2018/0371049; US 2019/0144563; and US 2019/0119350. For example, a scTCR can be specific for an NY-ESO epitope such as an SLLMWITQC (SEQ ID NO:178) peptide bound to an HLA complex comprising an HLA-A*0201 heavy chain and a β2M polypeptide. As an example, such a scTCR can comprise: i) a TCR α chain variable region comprising an aa sequence having at least 90%, at least 95%, at least 98%, at least 99%, or 100%, aa sequence identity to the aa sequence: MQEVTQIPAA LSVPEGENLV LNCSFTDSA IYNLQWFRQD PGKGLTSLLL IQSSQREQTS GRLNASLDKS SGRSTLYIAA SQPGDSATYL CAVRPTSGGS YIPTFGRGTS LIVHPY (SEQ ID NO:269), where aa 20 can be V or A; aa 51 can be Q, P, S, T, or M; aa 52 can be S, P, F, or G, aa 53 can be S, W, H, or T; aa 94 can be P, H, or A; aa 95 can be T, L, M, A, Q, Y, E, I, F, V, N, G, S, D, or R; aa 96 can be S, L, T, Y, I, Q, V, E, A, W, R, G, H, D, or K; aa 97 can be G, D, N, V, S, T, or A; aa 98 can be G, P, H, S, T, W, or A; aa 99 can be S, T, Y, D, H, V, N, E, G, Q, K, A, I, or R; aa 100 can be Y, F, M, or D; aa 101 can be I, P, T, or M; and aa 103 can be T or A; and ii) a TCR R chain variable region comprising an aa sequence having at least 90%, at least 95%, at least 98%, at least 99%, or 100%, aa sequence identity to the aa sequence: MGVTQTPKFQVLKT GQSMTLQCAQDMNHEYMSWYRQDPGMGLRLIHYSVGAGITDQGEVPNGYNVSRSTTEDFPLRL LSAAPSQTSVYFCASSYVGNTGELFFGEGSR LTVL (SEQ ID NO:270), where aa 18 can be M or V; aa 50 can be G, V, or I; aa 52 can be G or Q; aa 53 can be I, T, or M; aa 55 can be D or R; aa 56 can be Q or R; aa 70 can be T or I; aa 94 can be Y, N, or F; aa 95 can be V or L; and aa 97 can be N, G, or D. For example, in some cases, a scTCR can comprise: i) a TCR α chain variable region comprising the aa sequence: MQEVTQIPAA LSVPEGENL VLNCSFTDS AIYNLQWFRQ DPGKGLTSL LLIMSHQREQ TSGRLNASLD KSSGRSTLYI AASQPGDSAT YLCAVRPTSG GSYIPTFGRG TSLIVHPY (SEQ ID NO:271); and a TCR R chain variable region comprising the aa sequence:

(SEQ ID NO: 272)
MGVTQTPKFQVLKTGQSMTLQCAQDMNHEYMSWYRQDPGMGLRLIHYSVSA
GITDQGEVPNGYNVSRSTTEDFPLRLLSAAPSQTSVYFCASSYVGNTGELF
FGEGSR LTVL.

[0606] As another example, a scTCR can be specific for an HPV peptide epitope (e.g., an HPV peptide of the aa sequence YIIFVYIPL (HPV 16 E563-71; SEQ ID NO:273), KLPQLCTEL (HPV 16 E611-19; SEQ ID NO:274), TIHEIILECV (HPV 16 E6; SEQ ID NO:275), YMLDLQPET (HPV 16 E711-19; SEQ ID NO:276), TLGIVCPI (HPV 16 E786-93; SEQ ID NO:277), KCIDFYSRI (HPV 18 E667-75; SEQ ID NO:278), or FQQLFLNTL (HPV 18 E786-94; SEQ ID NO:279)) bound to an HLA complex comprising an HL heavy chain and a β2M polypeptide. As an example, such a scTCR can comprise: i) a TCR α chain variable region comprising an aa sequence having at least 90%, at least 95%, at least 98%, at least 99%, or 100%, aa sequence identity to the aa sequence: METLLGLLILQ LQLQWVSSKQ EVTQIPAALS VPEGENLVLN CSFTDSAIYN LQWFRQDPG KGLTSLLLIQ SSQREQTSGR LNASLDKSSG RSTLYIAASQ PGDSATYLCA VRETSGSRLT FGEGTQLTVN PD (SEQ ID NO:280); and ii) a TCR (3 chain variable region comprising an aa sequence having at least 90%, at least 95%, at least 98%, at least 99%, or 100%, aa sequence identity to the aa sequence: MGIRLLCRVA FCFLAVGLVD VKVTQSSRYL VKRTGEKVFL ECVQDMDHEN MFWYRQDPGL GLRLIYFSYD VKMKEKGDIP EGYSVSREKK ERFSLILESA STNQTSMYLC ASSFWGRSTD TQYFGPGTRL TVL (SEQ ID NO:281).

8 Epitopes and their Assessment

[0607] An unconjugated T-Cell-MP of the present disclosure may be conjugated at a chemical conjugation site to a variety of molecules that present an antigenic determinate to form a T-Cell-MP-epitope conjugate. The molecules presenting an epitope that may be conjugated to an unconjugated T-Cell-MP include those presenting non-peptide epitopes (e.g., carbohydrate epitopes), and peptide epitopes, phosphopeptide epitopes, glycosylated peptide (glycopeptide) epitopes, carbohydrate, and lipopeptide epitopes (e.g., peptides modified with fatty acids, isoprenoids, sterols, phospholipids, or glycosylphosphatidyl inositol); collectively referred to as an “epitope” or “epitopes”. The epitope presenting sequence of the peptide, phospho-peptide, lipopeptide, or glycopeptide) present in a T-Cell-MP-epitope conjugate can be a peptide of from 4 to 25 contiguous aas (e.g., 4 aa, 5 aa, 6 aa, 7 aa, 8 aa, 9 aa, 10 aa, 11 aa, 12 aa, 13 aa, 14 aa, 15 aa, 16 aa, 17 aa, 18 aa, 19 aa, 20 aa, 21 aa, 22 aa, 23 aa, 24 aa, or 25 aa, or from 7 aa to 25 aa, from 7 aa to 12 aa, from 7 aa to 25 aa, from 10 aa to 15 aa, from 15 aa to 20 aa, or from 20 aa to 25 aa).

[0608] Epitopes of a T-Cell-MP-epitope conjugate are not part of the T-Cell-MP as translated from mRNA, but, as indicated above, are added to a T-Cell-MP at a chemical conjugation site. Selection of candidate MHC allele and peptide (e.g., phosphopeptide, lipopeptides or glycopeptide) epitope combinations for effective presentation to a TCR by a T-Cell-MP-epitope conjugate can be accomplished using any of a number of well-known methods to determine if the free peptide has affinity for the specific HLA allele used to construct the T-Cell-MP in which it will be presented as part of the epitope conjugate.

[0609] It is possible to determine if the peptide in combination with the specific heavy chain allele and β2M can affect the T-Cell in the desired manner (e.g., induction of proliferation, anergy, or apoptosis). Applicable methods include binding assays and T cell activation assays including BLI assays utilized for assessing binding affinity of T-Cell-MPs with wt. and variant MODs discussed above. The epitope (e.g., peptide epitope) that will be used to prepare a T-Cell-MP-epitope conjugate of the present disclosure may bind to a T cell receptor (TCR) on a T cell with an affinity of at least 100 μM (e.g., at least 10 μM, at least 1 μM, at least 100 nM, at least 10 nM, or at least 1 nM). In some cases, the epitope binds to a TCR on a T cell with an affinity of from about 10 M to about 10⁻⁵ M, from about 10⁻⁵ M to about 10⁻⁶ M, from about 10⁻⁶ M to about 10 M, from about 10 M to about 10 M, or from about 10 M to about 10⁻⁹ M. Expressed another way, in some cases, the epitope present in a T-Cell-MP binds to a TCR on a T cell with an affinity of from about 1 nM to about to about 10 nM, from about 10 nM to about 100 nM, from about 0.1 μM to about 1 μM, from about 1 μM to about 10 μM, from about 10 μM to about 25 μM, from about 25 μM to about 50 μM, from about 50 μM to about 75 μM, or from about 75 μM to about 100 μM.

[0610] a. Cell-Based Binding Assays

[0611] As one example, cell-based peptide-induced stabilization assays can be used to determine if a candidate peptide binds an HLA class I allele intended for use in a T-Cell-MP-epitope conjugate. The binding assay can be used in the selection of peptides for incorporation into a T-Cell-MP-epitope conjugate using the intended allele. In this assay, a peptide of interest is allowed to bind to a TAP-deficient cell, i.e., a cell that has defective transporter associated with antigen processing (TAP) machinery, and consequently, few surface class I molecules. Such cells include, e.g., the human T2 cell line (T2 (174×CEM.T2; American Type Culture Collection (ATCC) No. CRL-1992)). Henderson et al. (1992) Science 255:1264. Without efficient TAP-mediated transport of cytosolic peptides into the endoplasmic reticulum, assembled class I complexes are structurally unstable, and retained only transiently at the cell surface. However, when T2 cells are incubated with an exogenous peptide capable of binding class I, surface peptide-HLA class I complexes are stabilized and can be detected by flow cytometry with, e.g., a pan anti-class I monoclonal antibody, or directly where the peptide is fluorescently labeled. The stabilization and resultant increased life-span of peptide-HLA complexes on the cell surface by the addition of a peptide validates their identity. Accordingly, binding of candidate peptides for presentation by various Class I HLA heavy chain alleles can be tested by genetically modifying the T2 or similar TAP deficient cells to express the HLA H allele of interest.

[0612] In a non-limiting example of use of a T2 assay to assess peptide binding to HLA A*0201, T2 cells are washed in cell culture medium, and suspended at 10⁶ cells/ml. Peptides of interest are prepared in cell culture medium and serially diluted providing concentrations of 200 μM, 100 μM, 20 μM and 2 μM. The cells are mixed 1:1 with each peptide dilution to give a final volume of 200 μL and final peptide concentrations of 100 μM, 50 μM, 10 μM and 1 μM. A HLA A*0201 binding peptide, GILGFVFTL (SEQ ID NO:282), and a non-HLA A*0201-restricted peptide, HPVGEADYF (HLA-B*3501; SEQ ID NO:283), are included as positive and negative controls, respectively. The cell/peptide mixtures are kept at 37° C. in 5% CO₂ for ten minutes; then incubated at room temperature overnight. Cells are then incubated for 2 hours at 37° C. and stained with a fluorescently-labeled anti-human HLA antibody. The cells are washed twice with phosphate-buffered saline and analyzed using flow cytometry. The average mean fluorescence intensity (MFI) of the anti-HLA antibody staining is used to measure the strength of binding.

[0613] Labeled (e.g., a radio or fluorescently labeled payload) T-Cell-MP-epitope conjugates including MOD-less T-Cell-MP-epitope conjugates, particularly in the form higher order complexes (e.g., duplexes, tetramers or pentamers) may be used in vitro to establish epitope specific binding between a T-Cell-MP-epitope conjugate and a T cell. T cell binding by T-MP-epitope conjugates and/or MOD-less T-Cell-epitope conjugates is not, however, limited to in vitro applications. Binding, particularly by higher order complexes of T-Cell-MP-epitope conjugates may be conducted in vivo or ex vivo to, for example, track epitope specific T cell movement and localization. The use of MOD-less molecules is advantageous as it limits the potential interference due to interactions between a MOD on a T-Cell-MP-epitope conjugate and Co-MOD on cells that are not of interest. In such in vivo or ex vivo binding assessments a labeled (e.g., fluorescent or radio labeled) T-Cell-MP-epitope conjugate, which may be MOD-less, is administered to a subject in vivo, or contacted with a tissue ex vivo. Once the T-Cell-MP-epitope conjugate binds a T-cell in the subject or tissue it will effectively label the T cell which may circulate or be localized as evidenced by the localization of the label. Accordingly, such labeled T-Cell-MP-epitope conjugates, including their MOD-less variants, find use both in research and as companion diagnostics. The label permits evaluation of epitope specific binding between the T-Cell-MP-epitope conjugate and target T cells and tracking of epitope specific T cells to determine of their fate. The label also permits a determination of the localization of the T-Cell-MP-epitope conjugate in vivo and/or ex vivo, which may be used to determine if a T-Cell-MP-epitope conjugate is localized to a tissue, including tissues to which a medical treatment is desired (e.g., tumor tissue).

[0614] b. Biochemical Binding Assays

[0615] MHC Class I complexes comprising a β2M polypeptide complexed with an HLA heavy chain polypeptide of a specific allele intended for use in construction of a T-Cell-MP can be tested for binding to a peptide of interest in a cell-free in vitro assay system. For example, a labeled reference peptide (e.g., fluorescently labeled) is allowed to bind the MHC-class I complex to form a MHC-reference peptide complex. The ability of a test peptide of interest to displace the labeled reference peptide from the complex is tested. The relative binding affinity is calculated as the amount of test peptide needed to displace the bound reference peptide. See, e.g., van der Burg et al. (1995) Human Immunol. 44:189.

[0616] As another example, a peptide of interest can be incubated with a MHC Class I complex (containing an HLA heavy chain peptide and β2M) and the stabilization of the MHC complex by bound peptide can be measured in an immunoassay format. The ability of a peptide of interest to stabilize the MHC complex is compared to that of a control peptide presenting a known T cell epitope. Detection of stabilization is based on the presence or absence of the native conformation of the MHC complex bound to the peptide using an anti-HLA antibody. See, e.g., Westrop et al. (2009) J. Immunol. Methods 341:76; Steinitz et al. (2012) Blood 119:4073; and U.S. Pat. No. 9,205,144.

[0617] c. T Cell Activation Assays

[0618] Whether a given peptide binds a MHC Class I complex (comprising an HLA heavy chain and a β2M polypeptide), and, when bound to the HLA complex, can effectively present an epitope to a TCR, can be determined by assessing T cell response to the peptide-HLA complex. T cell responses that can be measured include, e.g., interferon-gamma (IFNγ) production, cytotoxic activity, and the like.

[0619] (i) ELISPOT Assays

[0620] Suitable T cell activation assays include, e.g., an enzyme linked immunospot (ELISPOT) assay where production of a product by target cells (e.g., IFNγ production by target CD8+T) is measured following contact of the target with an antigen-presenting cell (APC) that presents a peptide of interest complexed with a class I MHC (e.g., HLA). Antibody to the target cell produced factor (e.g., IFNγ) is immobilized on wells of a multi-well plate. APCs are added to the wells, and the plates are incubated for a period of time with a peptide of interest, such that the peptide binds HLA class I on the surface of the APCs. CD8+ T cells specific for the peptide are added to the wells, and the plate is incubated for about 24 hours. The wells are then washed, and any released factor (e.g., IFNγ) bound to the immobilized antibody is detected using a detectably labeled antibody. A colorimetric assay can be used. For example, where IFNγ release is measured, a detectably labeled anti-IFNγ antibody can be a biotin-labeled anti-IFNγ antibody, which can be detected using, e.g., streptavidin conjugated to alkaline phosphatase, with a BCIP/NBT (5-bromo-4-chloro-3-indolyl phosphate/nitro blue tetrazolium) solution added, to develop the assay. The presence of IFNγ-secreting T cells is identified by colored spots. Negative controls include APCs not contacted with the peptide. APCs expressing various HLA heavy chain alleles can be used to determine whether a peptide of interest effectively binds to a HLA class I molecule comprising a particular HLA H chain.

[0621] (ii) Cytotoxicity Assays

[0622] Whether a given epitope (e.g., peptide) binds to a particular MHC class I heavy chain allele complexed with β2M, and, when bound, can effectively present an epitope to a TCR, can also be determined using a cytotoxicity assay. A cytotoxicity assay involves incubation of a target cell with a cytotoxic CD8⁺ T cell. The target cell displays on its surface a MHC class I complex comprising β2M, and the epitope and MHC heavy chain allele combination to be tested. The target cells can be radioactively labeled, e.g., with ⁵¹Cr. If the target cell effectively presents the epitope to a TCR on the cytotoxic CD8⁺ T cell, it induces cytotoxic activity by the CD8⁺ T cell toward the target cell, which is determined by measuring release of ⁵¹Cr from the lysed target cell. Specific cytotoxicity can be calculated as the amount of cytotoxic activity in the presence of the peptide minus the amount of cytotoxic activity in the absence of the peptide.

[0623] (iii) Detection of Antigen-Specific T Cells with Peptide-HLA Tetramers

[0624] As another example, multimers (e.g., dimers, tetramers, or pentamers) of peptide-MHC complexes are generated with a label or tag (e.g., fluorescent or heavy metal tags). The multimers can then be used to identify and quantify specific T cells via flow cytometry (FACS) or mass cytometry (CyTOF). Detection of epitope-specific T cells provides direct evidence that the peptide-bound HLA molecule is capable of binding to a specific TCR on a subset of antigen-specific T cells. See, e.g., Klenerman et al. (2002) Nature Reviews Immunol. 2:263.

[0625] d. Epitopes

[0626] An epitope present in a T-Cell-MP-epitope conjugate may be bound in an epitope-specific manner by a T cell (i.e., the epitope is specifically bound by an epitope-specific T cell whose TCR recognizes the peptide). An epitope-specific T cell binds an epitope having a reference aa sequence in the context of a specific MHC-H allele polypeptide/β2M complex, but does not substantially bind an epitope that differs from the reference aa sequence presented in the same context. For example, an epitope-specific T cell may bind an epitope in the context of a specific MHC-H allele polypeptide/β2M complex having a reference aa sequence, and may bind an epitope that differs from the reference aa sequence presented in the same context, if at all, with an affinity that is less than 10⁻⁻⁶ M, less than 10⁻⁵ M, or less than 10⁻⁴ M. An epitope-specific T cell may bind an epitope (e.g., a peptide presenting an epitope of interest) for which it is specific with an affinity of at least 10⁻⁷ M, at least 10⁻⁸ M, at least 10⁻⁹ M, or at least 10⁻¹⁰ M.

[0627] In some cases, the peptide epitope present in a T-Cell-MP-epitope conjugate presents an epitope-specific to an HLA-A, -B, -C, -E, —F or -G allele. In an embodiment, the peptide epitope present in a T-Cell-MP presents an epitope restricted to HLA-A*0101, A*0201, A*0301, A*1101, A*2301, A*2402, A*2407, A*3303, and/or A*3401. In an embodiment, the peptide epitope present in a T-Cell-MP presents an epitope restricted to HLA-B*0702, B*0801, B*1502, B*3802, B*4001, B*4601, and/or B*5301. In an embodiment, the peptide epitope present in a T-Cell-MP presents an epitope restricted to C*0102, C*0303, C*0304, C*0401, C*0602, C*0701, C*702, C*0801, and/or C*1502.

[0628] Among the epitopes that may be bound and presented to a TCR by a T-Cell-MP with a class I MHC-H and a β2M polypeptide sequence are cancer antigens, and antigens from infectious agents (e.g., viral or bacterial agents). Where T Cell dysregulation (e.g., CD8+ T cell dysregulation) resulting in over reaction to allergens, the epitopes that may be presented include the epitopes of self-antigens (self-epitopes) and allergens. For example, an allergen may be selected from protein or non-protein components of: nuts (e.g., tree and/or peanuts), glutens, pollens, eggs (e.g. chicken, Gallus domesticus eggs), shellfish, soy, fish, and insect venoms (e.g., bee and/or wasp venom antigens). Similarly, where dysregulation of CD8+T reg cells and self-reactive CD8+ effector T cells result in autoimmune diseases the epitope presented may be from a protein associated with, for example, multiple sclerosis, Rasmussen's encephalitis, paraneoplastic syndromes. Celiac disease, systemic sclerosis (SSc), type 1 diabetes (T1D), Grave's disease (GD), systemic lupus erythematosus (SLE), aplastic anemia (AA), or vitiligo.

[0629] (i) Epitopes Present in Cancers—Cancer-Associated Antigens (“CAAs”)

[0630] Suitable epitopes for inclusion in a T-Cell-MP-epitope conjugate or higher order complex of T-Cell-MP-epitope conjugates include, but are not limited to, epitopes present in cancer-associated antigens. Cancer-associated antigens are known in the art; see, e.g., Cheever et al. (2009) Clin. Cancer Res. 15:5323. Cancer-associated antigens include, but are not limited to, α-folate receptor; carbonic anhydrase IX (CAIX); CD19; CD20; CD22; CD30; CD33; CD44v7/8; carcinoembryonic antigen (CEA); epithelial glycoprotein-2 (EGP-2); epithelial glycoprotein-40 (EGP-40); folate binding protein (FBP); fetal acetylcholine receptor; ganglioside antigen GD2; Her2/neu; IL-13R-a2; kappa light chain; LeY; L1 cell adhesion molecule; melanoma-associated antigen (MAGE); MAGE-A1; mesothelin; MUC1; NKG2D ligands; oncofetal antigen (h5T4); prostate stem cell antigen (PSCA); prostate-specific membrane antigen (PSMA); tumor-associate glycoprotein-72 (TAG-72); vascular endothelial growth factor receptor-2 (VEGF-R2) (see, e.g., Vigneron et al. (2013) Cancer Immunity 13:15; and Vigneron (2015) BioMed Res. Int'l Article ID 948501); and epidermal growth factor receptor (EGFR) vIII polypeptide (see, e.g., Wong et al. (1992) Proc. Natl. Acad. Sci. USA 89:2965; and Miao et al. (2014) PLoSOne 9:e94281).

[0631] In some cases, a suitable peptide epitope for incorporation into a T-Cell-MP-epitope conjugate is a peptide fragment of from about 4 aas (aa) to about 20 aa (e.g., 4 aa, 5 aa, 6 aa, 7 aa, 8 aa, 9 aa, 10 aa, 11 aa, 12 aa, 13 aa, 14 aa, 15 aa, 16 aa, 17 aa, 18 aa, 19 aa, or 20 aa) in length of a MUC1 polypeptide, an LMP2 polypeptide, an epidermal growth factor receptor (EGFR) vIII polypeptide, a HER-2/neu polypeptide, a melanoma antigen (e.g., MAGE A3) polypeptide, a p53 polypeptide, a mutant p53 polypeptide, an NY-ESO-1 polypeptide, a folate hydrolase (prostate-specific membrane antigen; PSMA) polypeptide, a CEA polypeptide, a melanoma antigen recognized by T cells (melanA/MART1) polypeptide, a Ras polypeptide (including a KRAS polypeptide), a gp100 polypeptide, a proteinase3 (PR1) polypeptide, a bcr-abl polypeptide, a tyrosinase polypeptide, a survivin polypeptide, a prostate specific antigen (PSA) polypeptide, an hTERT polypeptide, a sarcoma translocation breakpoints polypeptide, a synovial sarcoma X (SSX) breakpoint polypeptide, an EphA2 polypeptide, an acid phosphatase, prostate (PAP) polypeptide, a melanoma inhibitor of apoptosis (ML-IAP) polypeptide, an alpha-fetoprotein (AFP) polypeptide, an epithelial cell adhesion molecule (EpCAM) polypeptide, an ERG (TMPRSS2 ETS fusion) polypeptide, a NA17 polypeptide, a paired-box-3 (PAX3) polypeptide, an anaplastic lymphoma kinase (ALK) polypeptide, an androgen receptor polypeptide, a cyclin B1 polypeptide, an N-myc proto-oncogene (MYCN) polypeptide, a Ras homolog gene family member C (RhoC) polypeptide, a tyrosinase-related protein-2 (TRP-2) polypeptide, a mesothelin polypeptide, a prostate stem cell antigen (PSCA) polypeptide, a melanoma associated antigen-1 (MAGE A1) polypeptide, a cytochrome P450 1B1 (CYP1B1) polypeptide, a placenta-specific protein 1 (PLAC1) polypeptide, a BORIS polypeptide (also known as CCCTC-binding factor or CTCF), an ETV6-AML polypeptide, a breast cancer antigen NY-BR-1 polypeptide (also referred to as ankyrin repeat domain-containing protein 30A), a regulator of G-protein signaling (RGSS) polypeptide, a squamous cell carcinoma antigen recognized by T cells (SART3) polypeptide, a carbonic anhydrase IX polypeptide, a paired box-5 (PAX5) polypeptide, an OY-TES1 (testis antigen; also known as acrosin binding protein) polypeptide, a sperm protein 17 polypeptide, a lymphocyte cell-specific protein-tyrosine kinase (LCK) polypeptide, a high molecular weight melanoma associated antigen (HMW-MAA), an A-kinase anchoring protein-4 (AKAP-4), a synovial sarcoma X breakpoint 2 (SSX2) polypeptide, an X antigen family member 1 (XAGE1) polypeptide, a B7 homolog 3 (B7H3; also known as CD276) polypeptide, a legumain polypeptide (LGMN1; also known as asparaginyl endopeptidase), a tyrosine kinase with Ig and EGF homology domains-2 (Tie-2; also known as angiopoietin-1 receptor) polypeptide, a P antigen family member 4 (PAGE4) polypeptide, a vascular endothelial growth factor receptor 2 (VEGF2) polypeptide, a MAD-CT-1 polypeptide, a fibroblast activation protein (FAP) polypeptide, a platelet derived growth factor receptor beta (PDGFI3) polypeptide, a MAD-CT-2 polypeptide, a Fos-related antigen-1 (FOSL) polypeptide or a claudin (e.g. claudin 18.2) polypeptide. In some cases, a human papilloma virus (HPV) antigen is specifically excluded. In some cases, an alpha-feto protein (AFP) antigen is specifically excluded. In some cases, a Wilms tumor-1 (WT1) antigen is specifically excluded.

[0632] Amino acid sequences of cancer-associated antigens that may be incorporated into a T-Cell-MP-epitope conjugate are known in the art; see, e.g., MUC1 (GenBank CAA56734); LMP2 (GenBank CAA47024); EGFRvIII (GenBank NP_001333870); HER-2/neu (GenBank AAI67147); MAGE-A3 (GenBank AAH11744); p53 (GenBank BAC16799); NY-ESO-1 (GenBank CAA05908); PSMA (GenBank AAH25672); CEA (GenBank AAA51967); melan/MART1 (GenBank NP_005502); Ras (GenBank NP_001123914); gp100 (GenBank AAC60634); bcr-abl (GenBank AAB60388); tyrosinase (GenBank AAB60319); survivin (GenBank AAC51660); PSA (GenBank CAD54617); hTERT (GenBank BAC11010); SSX (GenBank NP_001265620); Eph2A (GenBank NP_004422); PAP (GenBank AAH16344); ML-IAP (GenBank AAH14475); EpCAM (GenBank NP_002345); ERG (TMPRSS2 ETS fusion) (GenBank ACA81385); PAX3 (GenBank AAI01301); ALK (GenBank NP_004295); androgen receptor (GenBank NP_000035); cyclin B1 (GenBank CA099273); MYCN (GenBank NP_001280157); RhoC (GenBank AAH52808); TRP-2 (GenBank AAC60627); mesothelin (GenBank AAH09272); PSCA (GenBank AAH65183); MAGE A1 (GenBank NP_004979); CYP1B1 (GenBank AAM50512); PLAC1 (GenBank AAG22596); BORIS (GenBank NP_001255969); ETV6 (GenBank NP_001978); NY-BR1 (GenBank NP_443723); SART3 (GenBank NP_055521); carbonic anhydrase IX (GenBank EAW58359); PAX5 (GenBank NP_057953); OY-TES1 (GenBank NP_115878); sperm protein 17 (GenBank AAK20878); LCK (GenBank NP_001036236); HMW-MAA (GenBank NP_001888); AKAP-4 (GenBank NP_003877); SSX2 (GenBank CAA60111); XAGE1 (GenBank NP_001091073; XP_001125834; XP_001125856; and XP_001125872); B7H3 (GenBank NP_001019907; XP_947368; XP_950958; XP_950960; XP_950962; XP_950963; XP_950965; and XP_950967); LGMN1 (GenBank NP_001008530); TIE-2 (GenBank NP_000450); PAGE4 (GenBank NP_001305806); VEGFR2 (GenBank NP_002244); MAD-CT-1 (GenBank NP_005893 NP_056215); FAP (GenBank NP_004451); PDGFI3 (GenBank NP_002600); MAD-CT-2 (GenBank NP_001138574); and FOSL (GenBank NP_005429). These polypeptides are also discussed in, e.g., Cheever et al. (2009) Clin. Cancer Res. 15:5323, and references cited therein; Wagner et al. (2003) J. Cell. Sci. 116:1653; Matsui et al. (1990) Oncogene 5:249; Zhang et al. (1996) Nature 383:168.

[0633] (a) Alpha Feto Protein (AFP)

[0634] T-Cell-MP-epitope conjugates, or their higher order complexes (e.g., duplexes), may comprise a peptide presenting an epitope of alpha-feto protein (AFP), which has been associated with hepatocellular carcinoma, pancreatic cancer, stomach cancer, colorectal cancer, hepatoblastoma, and an ovarian yolk sac tumors. The AFP epitope may be presented in the context of a Class I MHC polypeptide sequence that may have a) an aa sequence having at least 95% aa (e.g., at least 97%, 98%, or 99%) sequence identity to the HLA-A*0101, HLA-A*0201, HLA-A*1101, HLA-A*2301, HLA-A*2402, HLA-A*2407, HLA-A*3303, or HLA-A*3401; b) an aa sequence having at least 95% aa (e.g., at least 97%, 98%, or 99%) sequence identity to the HLA-B*0702, HLA-B*0801, HLA-B*1502, HLA-B*3802, HLA-B*4001, HLA-B*4601, or HLA-B*5301; or c) an aa sequence having at least 95% aa (e.g., at least 97%, 98%, or 99%) sequence identity to the HLA-C*0102, HLA-C*0303, HLA-C*0304, HLA-C*0401, HLA-C*0602, HLA-C*0701, HLA-C*0702, HLA-C*0801, or HLA-C*1502 depicted in FIGS. 3A-3G.

[0635] AFP peptides that may be included in a T-Cell-MP-epitope conjugate include, but are not limited to, AITRKMAAT (SEQ ID NO:284); AYTKKAPQL (SEQ ID NO:285); LLNQHACAV (SEQ ID NO:286); KLVLDVAHV (SEQ ID NO:287); FMNKFIYEI (SEQ ID NO:288); SIPLFQVPE (SEQ ID NO:289); LLNFTESRT (SEQ ID NO:290); FVQEATYKF (SEQ ID NO:291); ATYKEVSKM (SEQ ID NO:292); KEVSKMVKD (SEQ ID NO:293); RHNCFLAHK (SEQ ID NO:294); ATAATCCQL (SEQ ID NO:295); YIQESQALA (SEQ ID NO:296); QLTSSELMAI (SEQ ID NO:297); KLSQKFTKV (SEQ ID NO:298); KELRESSLL (SEQ ID NO:299); SLVVDETYV (SEQ ID NO:300); ILLWAARYD (SEQ ID NO:301); KIIPSCCKA (SEQ ID NO:302); CRGDVLDCL (SEQ ID NO:303); QQDTLSNKI (SEQ ID NO:304); TMKQEFLINL (SEQ ID NO:305); NLVKQKPQI (SEQ ID NO:306); AVIADFSGL (SEQ ID NO:307); LLACGEGAA (SEQ ID NO:308); LACGEGAAD (SEQ ID NO:309); KAPQLTSSEL (SEQ ID NO:310); YICSQQDTL (SEQ ID NO:311); TECCKLTTL (SEQ ID NO:312); CTAEISLADL (SEQ ID NO:313); VTKELRESSL (SEQ ID NO:314); IMSYICSQQD (SEQ ID NO:315); TRTFQAITV (SEQ ID NO:316); FQKLGEYYL (SEQ ID NO:317); RVAKGYQEL (SEQ ID NO:318); SYQCTAEISL (SEQ ID NO:319); KQEFLINLV (SEQ ID NO:320); MKWVESIFL (SEQ ID NO:321); PVNPGVGQC (SEQ ID NO:322); AADIIIGHL (SEQ ID NO:323); QVPEPVTSC (SEQ ID NO:324); TTLERGQCII (SEQ ID NO:325); KMAATAATC (SEQ ID NO:326); QAQGVALQTM (SEQ ID NO:327); FQAITVTKL (SEQ ID NO:328); LLEKCFQTE (SEQ ID NO:329); VAYTKKAPQ (SEQ ID NO:330); KYIQESQAL (SEQ ID NO:331); GVALQTMKQ (SEQ ID NO:332); GQEQEVCFA (SEQ ID NO:333); SEEGRHNCFL (SEQ ID NO:334); RHPFLYAPTI (SEQ ID NO:335); TEIQKLVLDV (SEQ ID NO:336); RRHPQLAVSV (SEQ ID NO:337); GEYYLQNAFL (SEQ ID NO:338); NRRPCFSSLV (SEQ ID NO:339); LQTMKQEFLI (SEQ ID NO:340); IADFSGLLEK (SEQ ID NO:341); GLLEKCCQGQ (SEQ ID NO:342); TLSNKITEC (SEQ ID NO:343); LQDGEKIMSY (SEQ ID NO:344); GLFQKLGBY (SEQ ID NO:345); NEYGIASILD (SEQ ID NO:346); KMVKDALTAI (SEQ ID NO:347); FLASFVHEY (SEQ ID NO:348); AQFVQEATY (SEQ ID NO:349); EYSRRHPQL (SEQ ID NO:350); AYEEDRETF (SEQ ID NO:351; SYANRRPCF (SEQ ID NO:352); CFAEEGQKL (SEQ ID NO:353); RSCGLFQKL (SEQ ID NO:354); IFLIFLLNF (SEQ ID NO:355); KPEGLSPNL (SEQ ID NO:356); and GLSPNLNRFL (SEQ ID NO:357).

[0636] In some cases, the AFP peptide present in a T-Cell-MP-epitope conjugate presents an HLA-A*2402-restricted epitope. Non-limiting examples of AFP peptides that present an HLA-A*2402-restricted epitope include: KYIQESQAL (SEQ ID NO:331); EYYLQNAFL (SEQ ID NO:358); AYTKKAPQL (SEQ ID NO:285); EYSRRHPQL (SEQ ID NO:350); RSCGLFQKL (SEQ ID NO:354) and AYEEDRETF (SEQ ID NO:351).

[0637] In some cases, the AFP peptide present in a T-Cell-MP-epitope conjugate of the present disclosure is KYIQESQAL (SEQ ID NO:331). In some cases, the AFP peptide present in a T-Cell-MP-epitope conjugate of the present disclosure is EYYLQNAFL (SEQ ID NO:358). In some cases, the AFP peptide present in T-Cell-MP-epitope conjugate of the present disclosure is AYTKKAPQL (SEQ ID NO:285). In some cases, the AFP peptide present in a T-Cell-MP-epitope conjugate of the present disclosure is EYSRRHPQL (SEQ ID NO:350). In some cases, the AFP peptide present in a T-Cell-MP-epitope conjugate of the present disclosure is RSCGLFQKL (SEQ ID NO:354).

[0638] In some cases, the AFP peptide present in a T-Cell-MP of the present disclosure presents an HLA-A*0201-restricted epitope. Non-limiting examples of AFP peptides that present an HLA-A*0201-restricted epitope are: FMNKFIYEI (SEQ ID NO:288); and GLSPNLNRFL (SEQ ID NO:357).

[0639] (b) Wilms Tumor Antigen (WT-1)

[0640] T-Cell-MP-epitope conjugates and their higher order complexes (e.g., duplexes) may comprise a peptide presenting an epitope of Wilms Tumor-1 protein, which has been associated with myeloid leukemia, myeloma, ovarian cancer, pancreatic cancer, non-small cell lung cancer, colorectal cancer, breast cancer, Wilms tumor, mesothelioma, soft tissue sarcoma, neuroblastoma, and nephroblastoma. The WT-1 epitope may be presented in the context of a class I MHC presenting sequence. The WT-1 epitope may be presented in the context of a class I MHC presenting complex having at least 95% (e.g., at least 97%, 98%, or 99%) aa sequence identity to the HLA-A*0101, HLA-A*0201, HLA-A*1101, HLA-A*2301, HLA-A*2402, HLA-A*2407, HLA-A*3303, or HLA-A*3401; b) an aa sequence having at least 95% aa sequence identity to the HLA-B*0702, HLA-B*0801, HLA-B*1502, HLA-B*3802, HLA-B*4001, HLA-B*4601, or HLA-B*5301; or c) an aa sequence having at least 95% aa sequence identity to the HLA-C*0102, HLA-C*0303, HLA-C*0304, HLA-C*0401, HLA-C*0602, HLA-C*0701, HLA-C*0702, HLA-C*0801, or HLA-C*1502 depicted in FIGS. 3A-3G.

[0641] WT-1 peptides that may be included in a T-Cell-MP-epitope conjugate include, but are not limited to, NLMNLGATL (SEQ ID NO:359), NYMNLGATL (SEQ ID NO:360), CMTWNQMNLGATLKG (SEQ ID NO:361), WNQMNLGATLKGVAA (SEQ ID NO:362), CMTWNYMNLGATLKG (SEQ ID NO:363), WNYMNLGATLKGVAA (SEQ ID NO:364), TWNQMNLGATLKGV (SEQ ID NO:365), TWNQMNLGATLKGVA (SEQ ID NO:366), CMTWNLMNLGATLKG (SEQ ID NO:367), MTWNLMNLGATLKGV (SEQ ID NO:368), TWNLMNLGATLKGVA (SEQ ID NO:369), WNLMNLGATLKGVAA (SEQ ID NO:370), MNLGATLK (SEQ ID NO:371), MTWNYMNLGATLKGV SEQ ID NO:372), TWNYMNLGATLKGVA (SEQ ID NO:373), CMTWNQMNLGATLKGVA (SEQ ID NO:374), CMTWNLMNLGATLKGVA (SEQ ID NO:375), CMTWNYMNLGATLKGVA (SEQ ID NO:376), GYLRNPTAC (SEQ ID NO:377), GALRNPTAL (SEQ ID NO:378), YALRNPTAC (SEQ ID NO:379), GLLRNPTAC (SEQ ID NO:380), RYRPHPGAL (SEQ ID NO:381), YQRPHPGAL (SEQ ID NO:382), RLRPHPGAL (SEQ ID NO:383), RIRPHPGAL (SEQ ID NO:384), QFPNHSFKHEDPMGQ (SEQ ID NO:385), HSFKHEDPY (SEQ ID NO:386), QFPNHSFKHEDPM (SEQ ID NO:387), QFPNHSFKHEDPY (SEQ ID NO:388), KRPFMCAYPGCNK (SEQ ID NO:389), KRPFMCAYPGCYK (SEQ ID NO:390), FMCAYPGCY (SEQ ID NO:391), FMCAYPGCK (SEQ ID NO:392), KRPFMCAYPGCNKRY (SEQ ID NO:393), SEKRPFMCAYPGCNK (SEQ ID NO:394), KRPFMCAYPGCYKRY (SEQ ID NO:395), VLDFAPPGA (SEQ ID NO:396); RMFPNAPYL (SEQ ID NO:397); YMFPNAPYL (SEQ ID NO:398); SLGEQQYSV (SEQ ID NO:399); CYTWNQMNL (SEQ ID NO:400); CMTWNQMNL (SEQ ID NO:401); and NQMNLGATL (SEQ ID NO:402).

[0642] In some cases, the WT-1 peptide present in a T-Cell-MP-epitope conjugate presents an HLA-A*2402-restricted epitope. WT-1 peptides that present an HLA-A*2402-restricted epitope include, e.g., CMTWNQMN (SEQ ID NO:403); NYMNLGATL (SEQ ID NO:360) (WT-1 239-247; Q240Y); CYTWNQMNL (SEQ ID NO:400) (WT-1 235-243); CMTWNQMNL (SEQ ID NO:401) (WT-1 235-243); NQMNLGATL (SEQ ID NO:402) (WT-1 239-247); and NLMNLGATL (SEQ ID NO:359) (WT-1239-247; Q240L).

[0643] In some cases, the WT-1 peptide present in a T-Cell-MP-epitope conjugate presents an HLA-A*0201-restricted epitope. WT-1 peptides that present an HLA-A*0201-restricted epitope include, e.g., VLDFAPPGA (SEQ ID NO:396) (WT-1 37-45); RMFPNAPYL (SEQ ID NO:397) (WT-1 126-134); YMFPNAPYL (SEQ ID NO:398) (WT-1 126-134; R126Y); SLGEQQYSV (SEQ ID NO:399) (WT-1 187-195); and NLMNLGATL (SEQ ID NO:359) (WT-1 239-247; Q240L).

[0644] (c) Human Papilloma Virus I (HPV)

[0645] T-Cell-MP-epitope conjugates and their higher order complexes (e.g., duplexes) may comprise a peptide presenting an epitope of a human papilloma virus (HPV), which has been associated with cervical cancer, prostate cancer, or ovarian cancer. HPV epitopes may be presented in the context of a class I MHC presenting sequence. The HPV epitope may be presented in the context of a class I MHC presenting complex having at least 95% aa sequence identity to the HLA-A*0101, HLA-A*0201, HLA-A*1101, HLA-A*2301, HLA-A*2402, HLA-A*2407, HLA-A*3303, or HLA-A*3401; b) an aa sequence having at least 95% (e.g., at least 97%, 98%, or 99%) aa sequence identity to the HLA-B*0702, HLA-B*0801, HLA-B*1502, HLA-B*3802, HLA-B*4001, HLA-B*4601, or HLA-B*5301; or c) an aa sequence having at least 95% aa sequence identity to the HLA-C*0102, HLA-C*0303, HLA-C*0304, HLA-C*0401, HLA-C*0602, HLA-C*0701, HLA-C*0702, HLA-C*0801, or HLA-C*1502 depicted in FIGS. 3A-3G. HPV is also an infectious agent and its epitopes may be employed to alter the immune response to HPV for prophylaxis or treatment of an infection.

[0646] HPV peptide epitopes include, but are not limited to, those from the E6 and E7 gene products: E6 18-26 (KLPQLCTEL; SEQ ID NO:274); E6 26-34 (LQTTIHDII; SEQ ID NO:404); E6 49-57 (VYDFAFRDL; SEQ ID NO:405); E6 52-60 (FAFRDLCIV; SEQ ID NO:406); E6 75-83 (KFYSKISEY; SEQ ID NO:407); E6 80-88 (ISEYRHYCY; SEQ ID NO:408); E7 7-15 (TLHEYMLDL; SEQ ID NO:409); E7 11-19 (YMLDLQPET; SEQ ID NO:276); E7 44-52 (QAEPDRAHY; SEQ ID NO:410); E7 49-57 (RAHYNIVTF (SEQ ID NO:411); E7 61-69 (CDSTLRLCV; SEQ ID NO:412); E7 67-76 (LCVQSTHVDI; SEQ ID NO:413); E7 82-90 (LLMGTLGIV; SEQ ID NO:414); E7 86-93 (TLGIVCPI; SEQ ID NO:277); or E7 92-93 (LLMGTLGIVCPI; SEQ ID NO:415).

[0647] In some cases, the epitope is HPV16E7/82-90 (LLMGTLGIV; SEQ ID NO:414). In some cases, the epitope is HPV16E7/86-93 (TLGIVCPI; SEQ ID NO:277). In some cases, the epitope is HPV16E7/11-20 (YMLDLQPETT; SEQ ID NO:416). In some cases, the epitope is HPV16E7/11-19 (YMLDLQPET; SEQ ID NO:276). See, e.g., Ressing et al. ((1995) J. Immunol. 154:5934) for additional suitable HPV epitopes.

[0648] HPV peptides suitable for inclusion into a T-Cell-MP-epitope conjugate include HPV E6 peptides that binds HLA-A24 (e.g., is an HLA-A2401-restricted epitope). Non-limiting examples of such peptides include: VYDFAFRDL (SEQ ID NO:405); CYSLYGTTL (SEQ ID NO:417); EYRHYCYSL (SEQ ID NO:418); KLPQLCTEL (SEQ ID NO:274); DPQERPRKL (SEQ ID NO:419); HYCYSLYGT (SEQ ID NO:420); DFAFRDLCI (SEQ ID NO:421); LYGTTLEQQY (SEQ ID NO:422); HYCYSLYGTT (SEQ ID NO:423); EVYDFAFRDL (SEQ ID NO:424); EYRHYCYSLY (SEQ ID NO:425); VYDFAFRDLC (SEQ ID NO:426); YCYSIYGTTL (SEQ ID NO:427); VYCKTVLEL (SEQ ID NO:428); VYGDTLEKL (SEQ ID NO:429); and LTNTGLYNLL (SEQ ID NO:430).

[0649] In some cases, an HPV peptide suitable for inclusion into a T-Cell-MP-epitope conjugate is selected from the group consisting of: DLQPETTDL (SEQ ID NO:431); TLHEYMLDL (SEQ ID NO:409); TPTLHEYML (SEQ ID NO:432); RAHYNIVTF (SEQ ID NO:411); GTLGIVCPI (SEQ ID NO:433); EPDRAHYNI (SEQ ID NO:434); QLFLNTLSF (SEQ ID NO:435); FQQLFLNTL (SEQ ID NO:279); and AFQQLFLNTL (SEQ ID NO:436).

[0650] In some cases, a suitable HPV peptide presents an HLA-A*2401-restricted epitope. Nonlimiting examples of HPV peptides presenting an HLA-A*2401-restricted epitope are: VYDFAFRDL (SEQ ID NO:405); RAHYNIVTF (SEQ ID NO:411); CDSTLRLCV (SEQ ID NO:412); and LCVQSTHVDI (SEQ ID NO:413). In some cases, an HPV peptide suitable for inclusion in a T-Cell-MP of the present disclosure is VYDFAFRDL (SEQ ID NO:405). In some cases, an HPV peptide suitable for inclusion in a T-Cell-MP-epitope conjugate of the present disclosure is RAHYNIVTF (SEQ ID NO:411). In some cases, an HPV peptide suitable for inclusion in a T-Cell-MP of the present disclosure is CDSTLRLCV (SEQ ID NO:412). In some cases, an HPV peptide suitable for inclusion in a T-Cell-MP of the present disclosure is LCVQSTHVDI (SEQ ID NO:413).

[0651] (d) Hepatitis B Virus (HBV)

[0652] T-Cell-MP-epitope conjugates and their higher order complexes (e.g., duplexes) may comprise a peptide presenting an epitope of a hepatitis B virus (HBV), which has been associated with hepatocellular carcinoma. HBV epitopes may be presented in the context of a class I MHC presenting complex. The class I MHC may be a) an aa sequence having at least 95% a sequence identity to the HLA-A*0101, HLA-A*0201, HLA-A*1101, HLA-A*2301, HLA-A*2402, HLA-A*2407, HLA-A*3303, or HLA-A*3401; b) an aa sequence having at least 95% aa sequence identity to the HLA-B*0702, HLA-B*0801, HLA-B*1502, HLA-B*3802, HLA-B*4001, HLA-B*4601, or HLA-B*5301; or c) an aa sequence having at least 95% aa sequence identity to the HLA-C*0102, HLA-C*0303, HLA-C*0304, HLA-C*0401, HLA-C*0602, HLA-C*0701, HLA-C*0702, HLA-C*0801, or HLA-C*1502 depicted in FIGS. 3A-3G. HBV is also an infectious agent and its epitopes may be employed to alter the immune response to HBV for prophylaxis or treatment of an infection.

[0653] HBV peptides suitable for inclusion into a T-Cell-MP-Epitope conjugate include, but are not limited to, FLPSDFFPSV (SEQ ID NO:437), GLSRYVARLG (SEQ ID NO:438), KLHLYSHPI (SEQ ID NO:439), FLLSLGIHL (SEQ ID NO:440), ALMPLYACI (SEQ ID NO:441), SLYADSPSV (SEQ ID NO:442), STLPETTVV (SEQ ID NO:443), LIMPARFYPK (SEQ ID NO:444), AIMPARFYPK (SEQ ID NO:445), YVNVNMGLK (SEQ ID NO:446), MQWNSTALHQALQDP (SEQ ID NO:447), LLDPRVRGL (SEQ ID NO:448), SILSKTGDPV (SEQ ID NO:449), VLQAGFFLL (SEQ ID NO:450), FLLTRILTI (SEQ ID NO:451), FLGGTPVCL (SEQ ID NO:452), LLCLIFLLV (SEQ ID NO:453), LVLLDYQGML (SEQ ID NO:454), LLDYQGMLPV (SEQ ID NO:455), IPIPSSWAF (SEQ ID NO:456), WLSLLVPFV (SEQ ID NO:457), GLSPTVWLSV (SEQ ID NO:458), SIVSPFIPLL (SEQ ID NO:459), ILSPFLPLL (SEQ ID NO:460), ATVELLSFLPSDFFPSV (SEQ ID NO:461), LPSDFFPSV (SEQ ID NO:462), CLTFGRETV (SEQ ID NO:463), VLEYLVSFGV (SEQ ID NO:464), EYLVSFGVW (SEQ ID NO:465), ILSTLPETTV (SEQ ID NO:466), STLPETTVVRR (SEQ ID NO:467), NVSIPWTHK (SEQ ID NO:468), KVGNFTGLY (SEQ ID NO:469), GLYSSTVPV (SEQ ID NO:470), TLWKAGILYK (SEQ ID NO:471), TPARVTGGVF (SEQ ID NO:472), LVVDFSQFSR (SEQ ID NO:473), GLSRYVARL (SEQ ID NO:474), SIACSVVRR (SEQ ID NO:475), YMDDVVLGA (SEQ ID NO:476), PLGFFPDH (SEQ ID NO:477), QAFTFSPTYK (SEQ ID NO:478), KYTSFPWLL (SEQ ID NO:479), ILRGTSFVYV (SEQ ID NO:480), HLSLRGLFV (SEQ ID NO:481), VLHKRTLGL (SEQ ID NO:482), GLSAMSTTDL (SEQ ID NO:483), CLFKDWEEL (SEQ ID NO:484), and VLGGCRHKL (SEQ ID NO:485).

[0654] (ii) Infectious Agents

[0655] Suitable epitopes from infectious agents that may be included in a T-Cell-MP-epitope conjugate or its or higher order complexes (e.g., duplexes) T-Cell-MPs include, but are not limited to, epitopes present in an infectious virus, bacterium, fungus, protozoan, or helminth disease causing agents, e.g., an epitope presented by a virus-encoded polypeptide.

[0656] Examples of viral infectious disease agents include, e.g., Adenoviruses, Adeno-associated virus, Alphaviruses (Togaviruses), Eastern equine encephalitis virus, Eastern equine encephalomyelitis virus, Venezuelan equine encephalomyelitis vaccine strain TC-83, Western equine encephalomyelitis virus, Arenaviruses, Lymphocytic choriomeningitis virus (non-neurotropic strains), Tacaribe virus complex, Bunyaviruses, Bunyamwera virus, Rift Valley fever virus vaccine strain MP-12, Chikungunya virus, Calciviruses, Coronaviruses, Cowpox virus, Flaviviruses (Togaviruses)-Group B Arboviruses, Dengue virus serotypes 1, 2, 3, and 4, Yellow fever virus vaccine strain 17D, Hepatitis A, B, C, D, and E viruses, the Cytomegalovirus, Epstein Barr virus, Eastern Equine encephalitis virus, Herpes simplex types 1 and 2, Herpes zoster, Human herpesvirus types 6 and 7, hepatitis C virus (HVC), hepatitis B virus (HBV), Influenza viruses types A, B, and C, Papovaviruses, Newcastle disease virus, Measles virus, Mumps virus, Parainfluenza viruses types 1, 2, 3, and 4, polyomaviruses (JC virus, BK virus), Respiratory syncytial virus, Human parvovirus (B 19), Coxsackie viruses types A and B, Echoviruses, Polioviruses, Rhinoviruses, Alastrim (Variola minor virus), Smallpox (Variola major virus), Whitepox Reoviruses, Coltivirus, human Rotavirus, and Orbivirus (Colorado tick fever virus), Rabies virus, Vesicular stomatitis virus, Rubivirus (rubella), Semliki Forest virus, St. Louis encephalitis virus, Venezuelan equine encephalitis virus, Venezuelan equine encephalomyelitis virus, Arenaviruses (a.k.a. South American Hemorrhagic Fever virus), Flexal, Lymphocytic choriomeningitis virus (LCM) (neurotropic strains), Hantaviruses including Hantaan virus, Rift Valley fever virus, Japanese encephalitis virus, Yellow fever virus, Monkeypox virus, Human immunodeficiency virus (HIV) types 1 and 2, Human T cell lymphotropic virus (HTLV) types 1 and 2, Simian immunodeficiency virus (SIV), Vesicular stomatitis virus, Guanarito virus, Lassa fever virus, Junin virus, Machupo virus, Sabia, Crimean-Congo hemorrhagic fever virus, Ebola viruses, Marburg virus, Tick-borne encephalitis virus complex (flavi) including Central European tick-borne encephalitis, Far Eastern tick-borne encephalitis, Hanzalova, Hypr, Kumlinge, Kyasanur Forest disease, Omsk hemorrhagic fever, and Russian Spring Summer encephalitis viruses, Herpesvirus simiae (Herpes B or Monkey B virus), Cercopithecine herpesvirus 1 (Herpes B virus), Equine morbillivirus (Hendra and Hendra-like viruses), Nipah virus, Variola major virus (Smallpox virus), Variola minor virus (Alastrim), African swine fever virus, African horse sickness virus, Akabane virus, Avian influenza virus (highly pathogenic), Blue tongue virus, Camel pox virus, Classical swine fever virus, Cowdria ruminantium (heartwater), Foot and mouth disease virus, Goat pox virus, Japanese encephalitis virus, Lumpy skin disease virus, Malignant catarrhal fever virus, Menangle virus, Newcastle disease virus (VVND), Vesicular stomatitis virus (exotic), and Zika virus. Antigens encoded by such viruses are known in the art; a peptide epitope suitable for use in a T-Cell-MP-epitope conjugate of the present disclosure can include a peptide from any known viral antigen.

[0657] In embodiments where the T-Cell-MP-epitope conjugate includes a targeting sequence (e.g., a targeting sequence directed against a cancer-associated polypeptide) that directs the T-Cell-MP-epitope conjugate to a predetermined target cell or tissue (e.g., a cancerous cell or tissue), the epitope is advantageously one that binds T cells that already are present in the patient, e.g., resulting from exposure to a foreign agent such as a virus or bacteria, or from vaccination. For example, the epitope can be an epitope present in a viral antigen encoded by a virus that infects a majority of the human population, e.g., cytomegalovirus (CMV), Epstein-Barr virus (EBV), human papilloma virus, adenovirus, and the like, or for which a majority of the human population has immunity through vaccination, e.g., tetanus, or for which a patient has been specifically vaccinated, e.g., with a CMV, tetanus or HPV vaccine, prior to treatment with the T-Cell-MP-epitope conjugate. The result is that the T cells present in the patient are effectively redirected from taking action against cells presenting the epitope to taking action against target cells or tissues recognized by the targeting sequence. See e.g., FIG. 18.

[0658] (a) CMV Peptide Epitopes

[0659] As mentioned above, in some cases a T-Cell-MP-epitope conjugate of the present disclosure comprises a CMV peptide epitope, i.e., a peptide that when in a MHC/peptide complex (e.g., an HLA/peptide complex), presents a CMV epitope (i.e., an epitope present in a CMV antigen) to a T cell. As with other peptide epitopes of this disclosure, a CMV peptide epitope has a length of at least 4 amino acids, e.g., from 4 amino acids to about 25 amino acids (e.g., 4 amino acids (aa), 5 aa, 6 aa, 7 aa, 8 aa, 9 aa, 10 aa, 11 aa, 12 aa, 13 aa, 14 aa, 15 aa, 16 aa, 17 aa, 18 aa, 19 aa, 20 aa, 21 aa, 22 aa, 23 aa, 24 aa, or 25 aa, including within a range of from 4 to 20 aa., from 6 to 18 aa., from 8 to 15 aa. from 8 to 12 aa., from 5 to 10 aa., from 10 to 15 aa., from 15 to 20 aa., from 10 to 20 aa., or from 15 to 25 aa. in length).

[0660] A given CMV epitope-specific T cell binds an epitope having a reference amino acid sequence of a given CMV epitope, but does not substantially bind an epitope that differs from the reference amino acid sequence. For example, a given CMV epitope-specific T cell binds a CMV epitope having a reference amino acid sequence, and binds an epitope that differs from the reference amino acid sequence, if at all, with an affinity that is less than 10-6 M, less than 10-5 M, or less than 10-4 M. A given CMV epitope-specific T cell can bind an epitope for which it is specific with an affinity of at least 10-7 M, at least 10-8 M, at least 10-9 M, or at least 10-10 M.

[0661] In some cases, a CMV peptide epitope present in a T-Cell-MP-epitope conjugate of the present disclosure is a peptide from CMV pp65. In some cases, a CMV peptide epitope present in a T-Cell-MP-epitope conjugate of the present disclosure is a peptide from CMV gB (glycoprotein B).

[0662] For example, in some cases, a CMV peptide epitope present in a T-Cell-MP-epitope conjugate of the present disclosure is a peptide of a CMV polypeptide having a length of at least 4 amino acids, e.g., from 4 amino acids to about 25 amino acids (e.g., 4 amino acids (aa), 5 aa, 6 aa, 7 aa, 8 aa, 9 aa, 10 aa, 11 aa, 12 aa, 13 aa, 14 aa, 15 aa, 16 aa, 17 aa, 18 aa, 19 aa, 20 aa, 21 aa, 22 aa, 23 aa, 24 aa, or 25 aa, including within a range of from 4 to 20 aa., from 6 to 18 aa., from 8 to 15 aa. from 8 to 12 aa., from 5 to 10 aa., from 10 to 15 aa., from 15 to 20 aa., from 10 to 20 aa., or from 15 to 25 aa. in length), and comprising an amino acid sequence having at least 80%, at least 85%, at least 90%, at least 95%, at least 98%, at least 99%, or 100%, amino acid sequence identity to the following CMV pp65 amino acid sequence:

(SEQ ID NO: 486)
MESRGRRCPE MISVLGPISG HVLKAVFSRG DTPVLPHETR
LLQTGIHVRV SQPSLILVSQ YTPDSTPCHR GDNQLQVQHT
YFTGSEVENV SVNVHNPTGR SICPSQEPMS IYVYALPLKM
LNIPSINVHH YPSAAERKHR HLPVADAVIH ASGKQMWQAR
LTVSGLAWTR QQNQWKEPDV YYTSAFVFPT KDVALRHVVC
AHELVCSMEN TRATKMQVIG DQYVKVYLES FCEDVPSGKL
FMHVTLGSDV EEDLTMTRNP QPFMRPHERN GFTVLCPKNM
IIKPGKISHI MLDVAFTSHE HFGLLCPKSI PGLSISGNLL
MNGQQIFLEV QAIRETVELR QYDPVAALFF FDIDLLLQRG
PQYSEHPTFT SQYRIQGKLE YRHTWDRHDE GAAQGDDDVW
TSGSDSDEEL VTTERKTPRV TGGGAMAGAS TSAGRKRKSA
SSATACTSGV MTRGRLKAES TVAPEEDTDE DSDNEIHNPA
VFTWPPWQAG ILARNLVPMV ATVQGQNLKY QEFFWDANDI
YRIFAELEGV WQPAAQPKRR RHRQDALPGP CIASTPKKHR G.

[0663] As one non-limiting example, a CMV peptide epitope present in a T-Cell-MP-epitope conjugate of the present disclosure has the amino acid sequence NLVPMVATV (SEQ ID NO:487) and has a length of 9 amino acids.

[0664] In some cases, a CMV peptide epitope present in a T-Cell-MP-epitope conjugate of the present disclosure is a peptide having a length of at least 4 amino acids, e.g., from 4 amino acids to about 25 amino acids (e.g., 4 amino acids (aa), 5 aa, 6 aa, 7 aa, 8 aa, 9 aa, 10 aa, 11 aa, 12 aa, 13 aa, 14 aa, 15 aa, 16 aa, 17 aa, 18 aa, 19 aa, 20 aa, 21 aa, 22 aa, 23 aa, 24 aa, or 25 aa, including within a range of from 4 to 20 aa., from 6 to 18 aa., from 8 to 15 aa. from 8 to 12 aa., from 5 to 10 aa., from 10 to 15 aa., from 15 to 20 aa., from 10 to 20 aa., or from 15 to 25 aa. in length) of a CMV polypeptide comprising an amino acid sequence having at least 80%, at least 85%, at least 90%, at least 95%, at least 98%, at least 99%, or 100%, amino acid sequence identity to the following CMV gB amino acid sequence:

(SEQ ID NO: 488)
MESRIWCLVVCVNLCIVCLGAAVSSSSTSHATSSTHNGSHTSRTTSAQTRS
VYSQHVTSSEAVSHRANETIYNTTLKYGDVVGVNTTKYPYRVCSMAQGTDL
IRFERNIICTSMKPINEDLDEGIMVVYKRNIVAHTFKVRVYQKVLTFRRSY
AYIYTTYLLGSNTEYVAPPMWEIHHINKFAQCYSSYSRVIGGTVFVAYHRD
SYENKTMQLIPDDYSNTHSTRYVTVKDQWHSRGSTWLYRETCNLNCMLTIT
TARSKYPYHFFATSTGDVVYISPFYNGTNRNASYFGENADKFFIFPNYTIV
SDFGRPNAAPETHRLVAFLERADSVISWDIQDEKNVTCQLTFWEASERTIR
SEAEDSYHFSSAKMTATFLSKKQEVNMSDSALDCVRDEAINKLQQIFNTSY
NQTYEKYGNVSVFETSGGLVVFWQGIKQKSLVELERLANRSSLNITHRTRR
STSDNNTTHLSSMESVHNLVYAQLQFTYDTLRGYINRALAQIAEAWCVDQR
RTLEVFKELSKINPSAILSAIYNKPIAARFMGDVLGLASCVTINQTSVKVL
RDMNVKESPGRCYSRPVVIFNFANSSYVQYGQLGEDNEILLGNHRTEECQL
PSLKIFIAGNSAYEYVDYLFKRMIDLSSISTVDSMIALDIDPLENTDFRVL
ELYSQKELRSSNVFDLEEIMREFNSYKQRVKYVEDKVVDPLPPYLKGLDDL
MSGLGAAGKAVGVAIGAVGGAVASVVEGVATFLKNPFGAFTIILVAIAVVI
ITYLIYTRQRRLCTQPLQNLFPYLVSADGTTVTSGSTKDTSLQAPPSYEES
VYNSGRKGPGPPSSDASTAAPPYTNEQAYQMLLALARLDAEQRAQQNGTDS
LDGQTGTQDKGQKPNLLDRLRHRKNGYRHLKDSDEEENV.

[0665] In some cases, the CMV epitope present in a T-Cell-MP-epitope conjugate of the present disclosure presents an epitope specific to an HLA-A, -B, -C, -E, -F, or -G allele. In some cases, the peptide epitope present in a T-Cell-MP-epitope conjugate presents an epitope restricted to HLA-A*0101, A*0201, A*0301, A*1101, A*2301, A*2402, A*2407, A*3303, and/or A*3401. In some cases, the CMV epitope present in a T-Cell-MP-epitope conjugate of the present disclosure presents an epitope restricted to HLA-B*0702, B*0801, B*1502, B*3802, B*4001, B*4601, and/or B*5301. In some cases, the CMV epitope present in a T-Cell-MP-epitope conjugate of the present disclosure presents an epitope restricted to C*0102, C*0303, C*0304, C*0401, C*0602, C*0701, C*702, C*0801, and/or C*1502. As one example, in some cases, a T-Cell-MP-epitope conjugate of the present disclosure comprises: a) a CMV peptide epitope having amino acid sequence NLVPMVATV (SEQ ID NO:487) and having a length of 9 amino acids; b) an HLA-A*0201 class I heavy chain polypeptide; and c) a β2M polypeptide.

[0666] In some cases, a T-Cell-MP-epitope conjugate of the present disclosure comprises, as the cancer-targeting polypeptide (CTP), a scFv or a nanobody specific for a Her2 polypeptide present on the surface of a cancer cell; and comprises, as the epitope a CMV peptide epitope. In some cases, the CMV peptide is a peptide of a CMV pp65 polypeptide. In some cases, the CMV peptide epitope is a peptide of a CMV gB polypeptide. In some cases, the CMV peptide epitope has the amino acid sequence NLVPMVATV (SEQ ID NO:487) and has a length of 9 amino acids.

[0667] In some cases, a T-Cell-MP-epitope conjugate of the present disclosure comprises, as the CTP, a scFv or a nanobody specific for a MUC1 polypeptide present on the surface of a cancer cell; and comprises, as the epitope a CMV peptide epitope. In some cases, the CMV peptide epitope is a peptide of a CMV pp65 polypeptide. In some cases, the CMV peptide is a peptide of a CMV gB polypeptide. In some cases, the CMV peptide has the amino acid sequence NLVPMVATV (SEQ ID NO:487) and has a length of 9 amino acids.

[0668] In some cases, a T-Cell-MP-epitope conjugate of the present disclosure comprises, as the CTP, a scFv or a nanobody specific for a WT1 polypeptide present on the surface of a cancer cell; and comprises, as the epitope a CMV peptide epitope. In some cases, the CMV peptide epitope is a peptide of a CMV pp65 polypeptide. In some cases, the CMV peptide epitope is a peptide of a CMV gB polypeptide. In some cases, the CMV peptide epitope has the amino acid sequence NLVPMVATV (SEQ ID NO:487) and has a length of 9 amino acids.

[0669] In some cases, a T-Cell-MP-epitope conjugate of the present disclosure comprises, as the CTP, a scFv or a nanobody specific for a mesothelin polypeptide present on the surface of a cancer cell; and comprises, as the epitope a CMV peptide epitope. In some cases, the CMV peptide epitope is a peptide of a CMV pp65 polypeptide. In some cases, the CMV peptide epitope is a peptide of a CMV gB polypeptide. In some cases, the CMV peptide epitope has the amino acid sequence NLVPMVATV (SEQ ID NO: 487) and has a length of 9 amino acids.

[0670] In some cases, a T-Cell-MP-epitope conjugate of the present disclosure comprises, as the CTP, a scFv or a nanobody specific for a CD19 polypeptide present on the surface of a cancer cell; and comprises, as the epitope a CMV peptide epitope. In some cases, the CMV peptide epitope is a peptide of a CMV pp65 polypeptide. In some cases, the CMV peptide epitope is a peptide of a CMV gB polypeptide. In some cases, the CMV peptide epitope has the amino acid sequence NLVPMVATV (SEQ ID NO: 487) and has a length of 9 amino acids.

[0671] In some cases, a T-Cell-MP-epitope conjugate of the present disclosure comprises, as the CTP, a scFv or a nanobody specific for a BCMA polypeptide present on the surface of a cancer cell; and comprises, as the epitope a CMV peptide epitope. In some cases, the CMV peptide epitope is a peptide of a CMV pp65 polypeptide. In some cases, the CMV peptide epitope is a peptide of a CMV gB polypeptide. In some cases, the CMV peptide epitope has the amino acid sequence NLVPMVATV (SEQ ID NO: 487) and has a length of 9 amino acids.

[0672] In some cases, a T-Cell-MP-epitope conjugate of the present disclosure comprises, as the CTP, a scFv or a nanobody specific for a MUC16 polypeptide present on the surface of a cancer cell; and comprises, as the epitope a CMV peptide epitope. In some cases, the CMV peptide epitope is a peptide of a CMV pp65 polypeptide. In some cases, the CMV peptide epitope is a peptide of a CMV gB polypeptide. In some cases, the CMV peptide epitope has the amino acid sequence NLVPMVATV (SEQ ID NO: 487) and has a length of 9 amino acids.

### 9 Payloads—Drug And Other Conjugates

[0673] A polypeptide chain of a T-Cell-MP can comprise an attached payload such as a therapeutic (e.g., a small molecule drug or therapeutic) a label (e.g., a fluorescent label or radio label), or other biologically active agent that is linked (e.g., covalently attached) to the polypeptide chain at a chemical conjugation site. For example, where a T-Cell-MP comprises an Fc polypeptide, the Fc polypeptide may comprise a covalently linked payload molecule that treats a cancer, infectious disease, or an autoimmune disease, or is an agent that relieves a symptom of such diseases.

[0674] A payload can be linked directly or indirectly to a chemical conjugation site that is part of the polypeptide chain of a T-Cell-MP of the present disclosure (e.g., to scaffold such as an Ig Fc polypeptide). Direct linkage can involve linkage directly to an aa side chain. Indirect linkage can be linkage via a cross-linker, such as a bifunctional cross cross-linker. A payload can be linked to a T-Cell-MP by any acceptable chemical linkage including, but not limited to a thioether bond, an amide bond, a carbamate bond, a disulfide bond, or an ether bond formed by reaction with a crosslinking agent.

[0675] Crosslinkers (crosslinking agents) include cleavable cross-linkers and non-cleavable cross-linkers may be used to link payloads and/or targeting sequences to a T-Cell-MP polypeptide. The crosslinkers may comprise reactive NHS, maleimide, iodoacetate, bromoacetate and/or carboxyl groups. In some cases, the cross-linker is a protease-cleavable cross-linker. Suitable cross-linkers may include, for example, peptides (e.g., from 2 to 10 aas in length; e.g., 2, 3, 4, 5, 6, 7, 8, 9, or 10 aas in length), alkyl chains, poly(ethylene glycol), disulfide groups, thioether groups, acid labile groups, photolabile groups, peptidase labile groups, and esterase labile groups. Non-limiting example of suitable cross-linkers are: N-succinimidyl-[(N-maleimidopropionamido)-tetraethyleneglycol] ester (NHS-PEG4-maleimide); N-succinimidyl 4-(2-pyridyldithio)butanoate (SPDB); N-succinimidyl 4-(2-pyridyldithio)2-sulfobutanoate (sulfo-SPDB); N-succinimidyl 4-(2-pyridyldithio) pentanoate (SPP); N-succinimidyl-4-(N-maleimidomethyl)-cyclohexane-1-carboxy-(6-amidocaproate) (LC-SMCC); κ-maleimidoundecanoic acid N-succinimidyl ester (KMUA); γ-maleimide butyric acid N-succinimidyl ester (GMBS); ε-maleimidocaproic acid N-hydroxysuccinimide ester (EMCS); m-maleimide benzoyl-N-hydroxysuccinimide ester (MBS); N-(α-maleimidoacetoxy)-succinimide ester (AMAS); succinimidyl-6-(β-maleimidopropionamide)hexanoate (SMPH); N-succinimidyl 4-(p-maleimidophenyl)butyrate (SMPB); N-(p-maleimidophenyl)isocyanate (PMPI); N-succinimidyl 4(2-pyridylthio)pentanoate (SPP); N-succinimidyl(4-iodo-acetyl)aminobenzoate (SIAB); 6-maleimidocaproyl (MC); maleimidopropanoyl (MP); p-aminobenzyloxycarbonyl (PAB); N-succinimidyl 4-(maleimidomethyl)cyclohexanecarboxylate (SMCC); N-succinimidyl-4-(N-maleimidomethyl)-cyclohexane-1-carboxy-(6-amidocaproate), a “long chain” analog of SMCC (LC-SMCC); 3-maleimidopropanoic acid N-succinimidyl ester (BMPS); N-succinimidyl iodoacetate (SIA); N-succinimidyl bromoacetate (SBA); and N-succinimidyl 3-(bromoacetamido)propionate (SBAP).

[0676] T-Cell-MP-payload conjugates may be formed by reaction of a T-Cell-MP polypeptide (e.g., an Ig Fc polypeptide of a T-Cell-MP) with a crosslinking reagent to introduce 1-10 reactive groups. The polypeptide is then reacted with the molecule to be conjugated (e.g., a thiol-containing payload drug, label or agent) to produce a T-Cell-MP-payload conjugate. For example, where a T-Cell-MP of the present disclosure comprises an Ig Fc polypeptide, the conjugate can be of the form (A)-(L)-(C), where (A) is the polypeptide chain comprising the Ig Fc polypeptide; where (L), if present, is a cross-linker; and where (C) is a payload. (L), if present, links (A) to (C). In some cases, the T-Cell-MP includes an Ig Fc polypeptide sequence that comprises one or more (e.g., 2, 3, 4, 5, or more than 5) molecules of a payload. Introducing payloads into a T-Cell-MP using an excess of crosslinking agents can result in multiple molecules of payload being incorporated into the T-Cell-MP.

[0677] Suitable payloads (e.g., drugs) include virtually any small molecule (e.g., less than 2,000 Daltons in molecular weight) approved by the U.S. Food and Drug Administration, and/or listed in the 2020 U.S. Pharmacopeia or National Formulary. In an embodiment, those drugs are less than 1,000 molecular weight. Suitable drugs include antibiotics, chemotherapeutic (antineoplastic), anti-fungal, or anti-helminth agents and the like (e.g., sulfasalazine, azathioprine, cyclophosphamide, leflunomide; methotrexate, antimalarials, D-penicillamine, cyclosporine). Suitable chemotherapeutics may be alkylating agents, cytoskeletal disruptors (taxanes), epothilone, histone deacetylase inhibitors, topoisomerase I inhibitors, topoisomerase II inhibitors, kinase inhibitors, nucleotide analog or precursor analogs, peptide antineoplastic antibiotics (e.g. bleomycin or actinomycin), platinum-based agents, retinoids, or vinca alkaloids. Suitable drugs also include non-steroidal anti-inflammatory drugs and glucocorticoids, and the like. Suitable chemotherapeutics also include alkylating agents, cytoskeletal disruptors (taxanes), epothilone, histone deacetylase inhibitors, topoisomerase I inhibitors, topoisomerase II inhibitors, kinase inhibitors, nucleotide analog or precursor analogs, peptide antineoplastic antibiotics (e.g. bleomycin or actinomycin), platinum-based agents, retinoids, or vinca alkaloids.

[0678] In an embodiment, the payload is selected from the group consisting of: biologically active agents or drugs, diagnostic agents or labels, nucleotide or nucleoside analogs, nucleic acids or synthetic nucleic acids (e.g., antisense nucleic acids, small interfering RNA, double stranded (ds)DNA, single stranded (ss)DNA, ssRNA, dsRNA), toxins, liposomes (e.g., incorporating a chemotherapeutic such as 5-fluorodeoxyuridine), nanoparticles (e.g., gold or other metal bearing nucleic acids or other molecules, lipids, particles bearing nucleic acids or other molecules), and combinations thereof.

[0679] In an embodiment, the payload is selected from biologically active agents or drugs selected independently from the group consisting of: therapeutic agents (e.g., drugs or prodrugs), chemotherapeutic agents, cytotoxic agents, antibiotics, antivirals (e.g., remdesivir), cell cycle synchronizing agents, ligands for cell surface receptor(s), immunomodulatory agents (e.g., immunosuppressants such as cyclosporine), pro-apoptotic agents, anti-angiogenic agents, cytokines, chemokines, growth factors, proteins or polypeptides, antibodies or antigen binding fragments thereof, enzymes, proenzymes, hormones and combinations thereof.

[0680] In an embodiment the payload is a label, selected independently from the group consisting of photo detectable labels (e.g., dyes, fluorescent labels, phosphorescent labels, and luminescent labels), contrast agents (e.g., iodine or barium containing materials), radiolabels, imaging agents, paramagnetic labels/imaging agents (gadolinium containing magnetic resonance imaging labels), ultrasound labels and combinations thereof. In some embodiments, the payload is a label that is or includes a radioisotope. Examples of radioisotopes or other labels include, but are not limited to, ³H, ¹¹C, ¹⁴C, ¹⁵N, ³⁵S, ¹⁸F, ³²P, ³³P, ⁶⁴Cu, ⁶⁸Ga, ⁸⁹Zr, ⁹⁰Y, ⁹⁹Tc, ¹²³I, ¹²⁴I, ¹²⁵I, ¹³¹I, ¹¹¹In, ¹³¹In, ¹⁵³Sm, ¹⁸⁶Re, ¹⁸⁸Re, ²¹¹At, and ¹⁵³Pb.

### II. Nucleic Acids

[0681] The present disclosure provides a nucleic acid comprising a nucleotide sequence encoding a T-Cell-MP or more than one T-Cell-MP (e.g., a pair of T-Cell-MPs that form an interspecific heterodimer). The individual T-Cell-MPs of heteromer (e.g., an interspecific pair forming a heteroduplex) may be encoded in separate nucleic acids. Alternatively, the T-Cell-MPs of a heteromeric T-Cell-MP (e.g., an interspecific pair) may also be encoded in a single nucleic acid. Such nucleic acids include those comprising a nucleotide sequence encoding a T-Cell-MP having chemical conjugation sites (e.g., cysteine residues) that are provided in the MHC-H, β2M or scaffold polypeptide sequences of the T-Cell-MP, or into any linker (e.g., an L3 linker) joining those polypeptide sequences.

[0682] A. Nucleic Acids Encoding Unconjugated T-Cell-MPs

[0683] The present disclosure provides nucleic acids comprising nucleotide sequences encoding an unconjugated T-Cell-MP that may form higher order complexes (e.g., duplexes). The nucleotide sequences encoding an unconjugated T-Cell-MP may be operably linked to transcriptional control elements, e.g., promoters, such as promoters that are functional in a eukaryotic cell, where the promoter can be a constitutive promoter or an inducible promoter. As noted above, in some cases, the individual unconjugated T-Cell-MPs form heteromeric complexes (e.g., a heteroduplex T-Cell-MP comprising an interspecific scaffold pair). Heteromeric unconjugated T-Cell-MPs may be encoded in a single polycistronic nucleic acid sequence. Alternatively, heteromeric T cell-MPs may be encoded in separate monocistronic nucleic acid sequences with expression driven by separate transcriptional control elements. Where separate monocistronic sequences are utilized, they may be present in a single vector or in separate vectors.

[0684] The present disclosure includes and provides for a nucleic acid sequence encoding an unconjugated T-Cell-MP polypeptide that comprises (e.g., from N-terminus to C-terminus): (i) optionally one or more MOD polypeptide sequences (e.g., two or more MOD polypeptide sequences, such as in tandem, wherein when there are two or more MOD polypeptide sequences they are optionally joined to each other by independently selected L1 linkers); (ii) an optional L2 linker polypeptide sequence joining the one or more MOD polypeptide sequences to a β2M polypeptide sequence; (iii) the β2M polypeptide sequence; (iv) an optional L3 linker polypeptide sequence (e.g., from 10-50 aa in length); (v) a class I MHC-H polypeptide sequence; (vi) an optional L4 linker polypeptide sequence; (vii) a scaffold polypeptide sequence (e.g., an immunoglobulin Fc sequence); (viii) an optional L5 linker polypeptide sequence; and (ix) optionally one or more MOD polypeptide sequence (e.g., two or more MOD polypeptide sequences, such as in tandem, wherein when there are two or more MOD polypeptide sequences they are optionally joined to each other by independently selected L6 linkers); wherein the unconjugated T cell modulatory polypeptide comprises at least one MOD polypeptide sequence (e.g., the MOD(s) of element (i) and/or (ix)); and wherein at least one of the β2M polypeptide sequence, the L3 linker polypeptide sequence, and/or the MHC-H polypeptide sequence comprises a chemical conjugation site for epitope conjugation.

[0685] The present disclosure includes and provides for a nucleic acid sequence encoding an unconjugated T-Cell-MP polypeptide that comprises from N- to C-terminus: (i) optionally one or more MOD polypeptide sequences (e.g., two or more MOD polypeptide sequences, such as in tandem, wherein when there are two or more MOD polypeptide sequences they are optionally joined to each other by independently selected L1 linkers); (ii) an optional L2 linker polypeptide sequence; (iii) a β2M polypeptide sequence; (iv) an optional L3 linker polypeptide sequence (e.g., from 10-50 aa in length); (v) a class I MHC-H polypeptide sequence; (vi) an optional L4 linker polypeptide sequence; (vii) a scaffold polypeptide sequence (e.g., an immunoglobulin Fc sequence); (viii) an optional L5 linker polypeptide sequence; and (ix) optionally one or more MOD polypeptide sequence (e.g., two or more MOD polypeptide sequences, such as in tandem, wherein when there are two or more MOD polypeptide sequences they are optionally joined to each other by independently selected L6 linkers); wherein the unconjugated T cell modulatory polypeptide comprises at least one MOD polypeptide sequence (e.g., the MOD(s) of element (i) and/or (ix)); and wherein at least one of the β2M polypeptide sequence, the L3 linker polypeptide sequence, and/or the MHC-H polypeptide sequence comprises a chemical conjugation site for epitope conjugation.

[0686] The present disclosure includes and provides for a nucleic acid sequence encoding an unconjugated T-Cell-MP polypeptide that comprises from N- to C-terminus: (i) one or more MOD polypeptide sequences (e.g., two or more MOD polypeptide sequences, such as in tandem, wherein when there are two or more MOD polypeptide sequences they are optionally joined to each other by independently selected L1 linkers); (ii) an optional L2 linker polypeptide sequence; (iii) a β2M polypeptide sequence; (iv) an optional L3 linker polypeptide sequence (e.g., from 10-50 aa in length); (v) a class I MHC-H polypeptide sequence; (vi) an optional L4 linker polypeptide sequence; (vii) a scaffold polypeptide sequence (e.g., an immunoglobulin Fc sequence); (viii) an optional L5 linker polypeptide sequence; and (ix) optionally one or more MOD polypeptide sequence (e.g., two or more MOD polypeptide sequences, such as in tandem, wherein when there are two or more MOD polypeptide sequences they are optionally joined to each other by independently selected L6 linkers); wherein the unconjugated T cell modulatory polypeptide comprises at least one MOD polypeptide sequence (e.g., the MOD(s) of element (i) and/or (ix)); and wherein at least one of the β2M polypeptide sequence, the L3 linker polypeptide sequence, and/or the MHC-H polypeptide sequence comprises a chemical conjugation site for epitope conjugation.

[0687] Suitable MHC-H, β2-microglobulin (β2M) polypeptide, and scaffold polypeptides are described above. The MHC-H polypeptide may be a HLA-A, HLA-B, HLA-C, HLA-E, HLA-F, or HLA-G heavy chain. In some cases, the MHC-H polypeptide comprises an amino acid sequence having at least 85% aa sequence identity to the amino acid sequence depicted in any one of FIGS. 3A-3H. In such an embodiment the MHC Class I heavy chain polypeptide may not include a transmembrane anchoring domain and intracellular domain (see, e.g., the MHC-H polypeptides in FIG. 3D). In some cases, the first MHC polypeptide comprises a β2-microglobulin (β2M) polypeptide; and the second MHC polypeptide comprises a MHC Class I heavy chain polypeptide. In some cases, the β2M polypeptide comprises an amino acid sequence having at least about 85% (e.g., at lease about 90%, 95%, 98%, 99%, or even 100%) aa sequence identity to a β2M amino acid sequence depicted in FIG. 4

[0688] B. Recombinant Expression Vectors

[0689] The present disclosure provides recombinant expression vectors comprising nucleic acid sequence encoding T-Cell-MPs of the present disclosure. In some cases, the recombinant expression vector is a non-viral vector. In some embodiments, the recombinant expression vector is a viral construct, e.g., a recombinant adeno-associated virus construct (see, e.g., U.S. Pat. No. 7,078,387), a recombinant adenoviral construct, a recombinant lentiviral construct, a recombinant retroviral construct, a non-integrating viral vector, etc.

[0690] Suitable expression vectors include, but are not limited to, viral vectors (e.g., viral vectors based on vaccinia virus; poliovirus; adenovirus (see, e.g., Li et al., Invest Opthalmol Vis Sci 35:2543 2549, 1994; Borras et al., Gene Ther 6:515 524, 1999; Li and Davidson, PNAS 92:7700 7704, 1995; Sakamoto et al., H Gene Ther 5:1088 1097, 1999; WO 94/12649, WO 93/03769; WO 93/19191; WO 94/28938; WO 95/11984 and WO 95/00655); adeno-associated virus (see, e.g., Ali et al., Hum Gene Ther 9:81 86, 1998, Flannery et al., PNAS 94:6916 6921, 1997; Bennett et al., Invest Opthalmol Vis Sci 38:2857 2863, 1997; Jomary et al., Gene Ther 4:683 690, 1997, Rolling et al., Hum Gene Ther 10:641 648, 1999; Ali et al., Hum Mol Genet 5:591 594, 1996; Srivastava in WO 93/09239, Samulski et al., J. Vir. (1989) 63:3822-3828; Mendelson et al., Virol. (1988) 166:154-165; and Flotte et al., PNAS (1993) 90:10613-10617); SV40; herpes simplex virus; human immunodeficiency virus (see, e.g., Miyoshi et al., PNAS 94:10319 23, 1997; Takahashi et al., J Virol 73:7812 7816, 1999); a retroviral vector (e.g., Murine Leukemia Virus, spleen necrosis virus, and vectors derived from retroviruses such as Rous Sarcoma Virus, Harvey Sarcoma Virus, avian leukosis virus, lentivirus, human immunodeficiency virus, myeloproliferative sarcoma virus, and mammary tumor virus); and the like.

[0691] Numerous suitable expression vectors are known to those of skill in the art, and many are commercially available. The following vectors are provided by way of example for eukaryotic host cells: pXT1, pSG5 (Stratagene®), pSVK3, pBPV, pMSG, and pSVLSV40 (Pharmacia). However, any other vector may be used so long as it is compatible with the host cell.

[0692] Depending on the host/vector system utilized, any of a number of suitable transcription and translation control elements, including constitutive and inducible promoters, transcription enhancer elements, transcription terminators, etc., may be used in the expression vector (see, e.g., Bitter et al. (1987), Methods in Enzymology, 153:516-544).

[0693] Non-limiting examples of suitable eukaryotic promoters (promoters functional in a eukaryotic cell) include those from cytomegalovirus (CMV) immediate early, herpes simplex virus (HSV) thymidine kinase, early and late SV40, long terminal repeats (LTRs) from retrovirus, and mouse metallothionein-I. Selection of the appropriate vector and promoter is well within the level of ordinary skill in the art. The expression vector may also contain a ribosome binding site for translation initiation and a transcription terminator. The expression vector may also include appropriate sequences for amplifying expression.

### III. Methods of Generating and Selecting T-Cell-MPs

[0694] The present disclosure provides a method of obtaining T-Cell-MPs (both unconjugated T-Cell-MPs and/or T-Cell-MP-epitope conjugates) including in duplex and other higher order aggregates, which may include one or more wt. MOD polypeptide sequences and/or one or more variant MOD polypeptide sequences that exhibit lower affinity for a Co-MOD compared to the affinity of the corresponding wt. MOD polypeptide sequence for the Co-MOD, the method comprising:
[0695] A) generating a T-Cell-MP (or a higher order complex such as a duplex) by introducing into cells or cell-free systems one or more nucleic acids encoding an unconjugated T-Cell-MP or each of the unconjugated T-Cell-MPs that make up a heteromer (e.g., a heterodimeric duplex of unconjugated T-Cell-MPs);
[0696] wherein when the T-Cell-MP comprises one or more nascent chemical conjugation sites, the nascent chemical conjugation site may be activated to produce an unconjugated T-Cell-MP with chemical conjugation site (e.g., reacting sulfatase motifs with an FGE to convert a Cys residue to a fGly residue if the cells translating the T-Cell-MP nucleic acids do not express a formylglycine generating enzyme).

[0697] The above-mentioned method of generating T-Cell-MPs may further comprise providing one or more nucleic acids encoding the unconjugated T-Cell-MP, including those specifically described in the present disclosure, which may be present in a recombinant expression vector and/or operably linked to a transcriptional control elements such as those functional in a eukaryotic cell. The method may be stopped at this point and the unconjugated T-Cell-MP (e.g., unconjugated duplex T-Cell-MP) that is unpurified (including cell lysates and unpurified media) may be obtained. Alternatively, the unconjugated T-Cell-MP may be purified using, for example, one or more of salt precipitation (e.g., ammonium sulfate), affinity chromatography, and/or size exclusion chromatography, to produce crude (less than 60% by weight), initially refined (at least 60% by weight), partly refined (at least 80% by weight), substantially refined (at least 95% by weight), partially pure or partially purified (at least 98% by weight), substantially pure or substantially purified (at least 99% by weight), essentially pure or essentially purified (at least 99.5% by weight) or purified (at least 99.8%) or highly purified (at least 99.9% by weight) of the unconjugated T-Cell-MP based on the total weight of protein present in the sample may be obtained by purification. Where a T-Cell-MP-epitope conjugate is desired, the method may be continued by reacting anywhere from a crude preparation to a highly purified preparation T-Cell-MP with an epitope presenting molecule as in step B:
[0698] B) providing an epitope (e.g., an epitope-presenting peptide) suitable for conjugation with the chemical conjugation site present in the unconjugated T-Cell-MP of step A (e.g., a hydrazinyl or hydrazinyl indole modified peptide for reaction with a formyl glycine of a sulfatase motif or a maleimide containing peptide for reaction with a cysteine residue), and contacting the epitope with the T-Cell-MP (e.g., under suitable reaction conditions) to produce a T-Cell-MP-epitope conjugate.
   The choice of how purified the unconjugated material entered into the reaction needs to be depends on a number of factors including the conjugation reaction and conditions, the potential for side reactions, and the degree to which the final epitope conjugate will need to be purified.

[0699] The T-Cell-MP-epitope conjugate (e.g., as a duplex or a higher order complex) may be purified by, for example, salt precipitation, size separation, and/or affinity chromatography, so that it is at least partly refined (at least 80% by weight of protein present in the sample), substantially refined (at least 95% by weight), partially pure or partially purified (at least 98% by weight), substantially pure or substantially purified (at least 99% by weight), essentially pure or essentially purified (at least 99.5% by weight), purified (at least 99.8%), or highly purified (at least 99.9% by weight) of the T-Cell-MP-epitope conjugate based on the total weight of protein present in the sample.

[0700] Where it is desirable for a T-Cell-MP or higher order complexes to contain a payload, the payload may be reacted with the unconjugated T-Cell-MP or the T-Cell-MP-epitope conjugate. The selectivity of the epitope and the payload for different conjugation sites may be controlled through the use of orthogonal chemistries and/or control of stoichiometry in the conjugation reactions. In embodiments, linkers (e.g., polypeptides or other bifunctional chemical linkers) may be used to attach the epitope and/or payloads to their conjugation sites. The payload may be a cytotoxic agent that is selected from, for example, maytansinoids, benzodiazepines, taxoids, CC-1065, duocarmycin, a duocarmycin analogs, calicheamicin, dolastatin, a dolastatin analogs, auristatin, tomaymycin, and leptomycin, or a pro-drug of any one of the foregoing. The payload may be a retinoid. When possible, a single purification scheme that removes reagents and other materials present from the conjugation of the epitope and attachment of the payload is employed to minimize loss of the protein.

[0701] A variety of cells and cell-free systems may be used for the preparation of unconjugated T-Cell-MPs. As discussed in the section titled “Genetically Modified Host cells,” the cells may be eukaryotic origin, and more specifically of mammalian, primate or even human origin.

[0702] The present disclosure provides a method of obtaining an unconjugated T-Cell-MP or T-Cell-MP-epitope conjugate (or their higher order complexes, such as duplexes) comprising one or more wt. MODs and/or variant MODs that exhibit reduced affinity for a Co-MOD compared to the affinity of the corresponding parental wt. MOD for the Co-MOD. Where a variant MOD having reduced affinity is desired, the method can comprise preparing a library of variant MOD polypeptides (e.g., that have at least one insertion, deletion or substitution) and selecting from the library of MOD polypeptides a plurality of members that exhibit reduced affinity for their Co-MOD (such as by BLI as described above). Once a variant MOD is selected a nucleic acid encoding the unconjugated T-Cell-MP including the variant MOD is prepared and expressed. After the unconjugated T-Cell-MP has been expressed it can be purified, and if desired conjugated to an epitope to produce the selected T-Cell-MP-epitope conjugate. The process may be repeated to prepare a library of unconjugated T-Cell-MPs or their epitope conjugates.

[0703] The present disclosure provides a method of obtaining a T-Cell-MP-epitope conjugate or its higher order complexes, such as a duplex) that exhibits selective binding to a T cell, the method comprising:
[0704] A) generating a library of T-Cell-MP-epitope conjugates (or their higher order complexes) comprising a plurality of members, wherein each member comprises a different variant MOD on the T-Cell-MP-epitope conjugate, wherein the variant MOD differs in amino acid sequence (e.g., by from 1 aa to 10 aas) from its parental wt. MOD, and wherein the T-Cell-MP-epitope conjugate library members further comprise an epitope tag or a fluorescent label), and
[0705] B) contacting a T-Cell-MP-epitope conjugate library member with a target T cell expressing on its surface: i) a Co-MOD that binds the parental wt. MOD; and ii) a TCR that binds to the epitope;
[0706] C) selecting a T-Cell-MP-epitope conjugate library member that selectively binds the target T cell relative to its binding under the same conditions to a control T cell that comprises: i) the Co-MOD that binds the parental wt. MOD; and ii) a TCR that binds to an epitope other than the epitope present in the T-Cell-MP library member (e.g., choosing the T-Cell-MP-epitope conjugate that has higher avidity or affinity for the target T cell than the control T cell such as by BLI as described above).
   A T-Cell-MP-epitope conjugate library member that is identified as selectively binding to a target T cell may be isolated from the library.

[0707] When the T-Cell-MP-epitope conjugate comprises an epitope tag or label, identifying a T-Cell-MP-epitope conjugate selective for a target T cell may comprise detecting the epitope tag or label associated with target and control T cells by using, for example, flow cytometry. While labeled T-Cell-MPs (e.g., fluorescently labeled) do not require modification to be detected, epitope tagged molecules may require contacting with an agent that renders the epitope tag visible (e.g., a fluorescent agent that binds the epitope tag). The affinity/avidity of the T-Cell-MP-epitope conjugate can be determined by measuring the agent or label associated with target and control T cells (e.g., by measuring the mean fluorescence intensity using flow cytometry) over a range of concentrations. The T-Cell-MP-epitope conjugate that binds with the highest affinity or avidity to the target T cell relative to the control T cell is understood to selectively bind to the target T cell.

[0708] MOD and Co-MOD pairs, including wt. and variant MOD and Co-MOD pairs, utilized in the methods of obtaining T-Cell-MPs and methods of obtaining a T-Cell-MP-epitope conjugate that exhibits selective binding to a T cell may be selected from: IL-2 and IL-2 receptor; 4-1BBL and 4-1BB; PD-L1 and PD-1; FasL and Fas; TGF-β and TGF-β receptor; CD80 and CD28; CD86 and CD28; OX40L and OX40; ICOS-L and ICOS; ICAM and LFA-1; JAG1 and Notch; JAG1 and CD46; CD70 and CD27; CD80 and CTLA4; and CD86 and CTLA4. Alternatively, they may be selected from IL-2 and IL-2 receptor; 4-1BBL and 4-1BB; PD-L1 and PD-1; FasL and Fas; CD80 and CD28; CD86 and CD28; CD80 and CTLA4; and CD86 and CTLA4. In some cases, the variant MODs present in a T-Cell-MP, which are independently selected, comprise from 1 to 20 aa independently selected sequence variations (e.g., 1, 2, 3, 4, 5, 6, 7, 8, 9, 10, 11, 12, 13, 14, 15, 16, 17, 18, 19, or 20 aa substitutions, deletions, or insertions) compared to the corresponding parental wt. MOD.

[0709] A T-Cell-MP (unconjugated T cell-MP or T-Cell-MP-epitope conjugate) may comprise two or more wt. and/or variant MODs. The two or more MODs may comprise the same or different amino acid sequence. The two or more MODs may be on the same T-Cell-MP (e.g., in tandem) of a T cell-MP-duplex. The first of two or more MODs may be on the first T-Cell-MP of a T-Cell-MP duplex and the second of two variant MODs may be on the second T-Cell-MP of the duplex.

### IV. Genetically Modified Host Cells

[0710] The present disclosure provides a genetically modified host cell, where the host cell is genetically modified with a nucleic acid of the present disclosure (e.g., a nucleic acid encoding an unconjugated T-Cell-MP that may be operably linked to a promoter). Where such cell express T-Cell-MPs they may be utilized in methods of generating and selecting T-Cell-MPs as discussed in the preceding section.

[0711] Suitable host cells include eukaryotic cells, such as yeast cells, insect cells, and mammalian cells. In some cases, the host cell is a cell of a mammalian cell line. Suitable mammalian cell lines include human cell lines, non-human primate cell lines, rodent (e.g., mouse, rat) cell lines, and the like. Suitable mammalian cell lines include, but are not limited to, HeLa cells (e.g., American Type Culture Collection (ATCC) No. CCL-2™), CHO cells (e.g., ATCC Nos. CRL-9618™, CCL-61TM, CRL9096), 293 cells (e.g., ATCC No. CRL-1573™), Vero cells, NIH 3T3 cells (e.g., ATCC No. CRL-1658), Huh-7 cells, BHK cells (e.g., ATCC No. CCL-10™), PC12 cells (ATCC No. CRL-1721™), COS cells, COS-7 cells (ATCC No. CRL1651), RAT1 cells, mouse L cells (ATCC No. CCLI.3), human embryonic kidney (HEK) cells (ATCC No. CRL1573), HLHepG2 cells, and the like.

[0712] In some cases, the host cell is a mammalian cell that has been genetically modified such that it does not synthesize endogenous β2M and/or such that it does not synthesize endogenous MHC Class I heavy chains (MHC-H). In addition to the foregoing, host cells expressing formylglycine generating enzyme (FGE) activity are discussed above for use with T-Cell-MPs comprising a sulfatase motif, and such cells may advantageously be modified such that they do not express at least one, if not both, of the endogenous MHC β2M and MHC-H proteins.

### V. Compositions and Formulations

[0713] The present disclosure provides compositions and formulations, including pharmaceutical compositions and formulations. Compositions may comprise: a) a T-Cell-MP and b) an excipient. Where the excipient(s) present in a composition or formulation are pharmaceutically acceptable excipients, the composition may be a pharmaceutically composition or formulation. Pharmaceutical compositions or formulations may also be sterile and/or pyrogen free. Some pharmaceutically acceptable excipients are provided below. The present disclosure also provides compositions and formulations, including pharmaceutical compositions, comprising a nucleic acid or a recombinant expression vector, where the nucleic acid or expression nucleic acid encodes all or part of a T-Cell-MP or its higher order complexes (e.g., one T-Cell-MP of a heterodimeric T-Cell-MP duplex).

[0714] A. Compositions Comprising T-Cell-MP-Epitope Conjugates

[0715] Compositions of the present disclosure may comprise, in addition to a T-Cell-MP, one or more of: a salt, e.g., NaCl, MgCl₂, CaCl₂, KCl, MgSO₄, sodium acetate, sodium lactate, etc.; a buffering agent, (e.g., a Tris buffer, N-(2-Hydroxyethyl)piperazine-N′-(2-ethanesulfonic acid) (HEPES), 2-(N-Morpholino)ethanesulfonic acid (MES), 2-(N-Morpholino)ethanesulfonic acid sodium salt (MES), 3-(N-Morpholino)propanesulfonic acid (MOPS), N-tris[Hydroxymethyl]methyl-3-aminopropanesulfonic acid (TAPS), etc.); a solubilizing agent; a detergent (surfactants), e.g., a non-ionic detergent such as Tween-20, etc.; a protease inhibitor; glycerol; and the like; any or all of which may be in the form of solvates (e.g., mixed ionic salts with water and/or organic solvents), hydrates, or the like.

[0716] A pharmaceutically acceptable compositions comprising a T-Cell-MP epitope conjugate may comprise, in addition to the T-Cell-MP, a pharmaceutically acceptable excipient, a variety of which are known in the art and need not be discussed in detail herein. Pharmaceutically acceptable compositions (e.g., injectable formulations) may be sterile and/or free of pyrogens and other materials detrimental to administration to patients or subjects (e.g., lipopolysaccharides). Pharmaceutically acceptable excipients have been amply described in a variety of publications including, for example, “Remington: The Science and Practice of Pharmacy”, 19^{th} Ed. (1995), or latest edition, Mack Publishing Co; A. Gennaro (2000) “Remington: The Science and Practice of Pharmacy,” 20th edition, Lippincott, Williams, & Wilkins; Pharmaceutical Dosage Forms and Drug Delivery Systems (1999) H. C. Ansel et al., eds 7^{th} ed., Lippincott, Williams, & Wilkins; and Handbook of Pharmaceutical Excipients (2000) A. H. Kibbe et al., eds., 3^{rd} ed. Amer. Pharmaceutical Assoc.

[0717] A subject pharmaceutical composition may be suitable for administration to a subject, e.g., will generally be sterile. For example, in some embodiments, a subject pharmaceutical composition will be suitable for administration to a human subject, e.g., where the composition is sterile and is free of detectable pyrogens and/or other toxins. A pharmaceutical composition may be suitable for use ex vivo or in vitro (ex vivo treatment of cells) where, for example, it may be contacted with cells and then subsequently removed prior to administration of the cells to a subject.

[0718] The T-Cell-MP compositions, including pharmaceutical compositions, may also comprise components, such as mannitol, lactose, starch, magnesium stearate, sodium saccharin, talcum, cellulose, glucose, sucrose, glycerol, magnesium, carbonate, and the like, any or all of which may be pharmaceutical grade.

[0719] Compositions may be in the form of aqueous or other solutions, powders, granules, tablets, pills, suppositories, capsules, suspensions, sprays, and the like. The composition may be formulated according to the various routes of administration described below.

[0720] Where a T-Cell-MP epitope conjugate of the present disclosure is administered as an injectable (e.g., subcutaneously, intraperitoneally, intramuscularly, and/or intravenously) directly into a tissue, a formulation can be provided as a ready-to-use dosage form, a non-aqueous form (e.g., a reconstitutable storage-stable powder) or an aqueous form, such as liquid composed of pharmaceutically acceptable carriers and excipients. T-Cell-MP formulations may also be provided so as to enhance serum half-life of the subject protein following administration. For example, the T-Cell-MP may be provided in a liposome formulation, prepared as a colloid, or other conventional techniques for extending serum half-life. A variety of methods are available for preparing liposomes, as described in, e.g., Szoka et al. 1980 Ann. Rev. Biophys. Bioeng. 9:467, U.S. Pat. Nos. 4,235,871, 4,501,728 and 4,837,028. The preparations may also be provided in controlled release or slow-release forms.

[0721] Other examples of formulations suitable for parenteral administration include those comprising sterile injection solutions, salts, anti-oxidants, bacteriostats, and/or solutes that render the formulation isotonic with the blood of the intended recipient. Such parenteral formulations may also include one or more independently selected suspending agents, solubilizers, thickening agents, stabilizers, and preservatives.

[0722] Formulations or pharmaceutical composition comprising a T-Cell-MP can be present in a container, e.g., a sterile container, such as a syringe. The formulations can also be presented in unit-dose or multi-dose sealed containers, such as ampules and vials, any of which may be sterile. The formulation or pharmaceutical compositions may be stored in a sterile freeze-dried (lyophilized) condition requiring only the addition of the sterile liquid excipient, for example, water, for injections, immediately prior to use. Extemporaneous injection solutions and suspensions can be prepared from sterile solutions, powders, granules, and/or tablets that comprise the T-Cell-MP.

[0723] The concentration of a T-Cell-MP in a formulation can vary widely (e.g., from less than about 0.1%, usually at or at least about 2% to as much as 20% to 50% or more by weight) and will usually be selected primarily based on fluid volumes, viscosities, and patient-based factors in accordance with the particular mode of administration selected and the patient's needs.

[0724] In some cases, a T-Cell-MP is present in a liquid composition. Thus, the present disclosure provides compositions (e.g., liquid compositions, including pharmaceutical compositions) comprising a T-Cell-MP of the present disclosure. The present disclosure also provides a composition comprising: a) a T-Cell-MP of the present disclosure; and b) saline (e.g., 0.9% or about 0.9% NaCl). In some cases, the composition is sterile. The composition may be suitable for administration to a human subject, e.g., where the composition is sterile and is free of detectable pyrogens and/or other toxins. Thus, the present disclosure provides a composition comprising: a) a T-Cell-MP-epitope conjugate; and b) saline (e.g., 0.9% or about 0.9% NaCl), where the composition is sterile and is free of detectable pyrogens and/or other toxins.

[0725] B. Compositions Comprising a Nucleic Acid or a Recombinant Expression Vector

[0726] The present disclosure provides compositions (e.g., pharmaceutical compositions) comprising a nucleic acid or a recombinant expression vector of the present disclosure (see, e.g., supra) that comprise one or more nucleic acid sequences encoding any one or more T-Cell-MP polypeptide (or each of the polypeptides of a duplex T-Cell-MP multimer such as a heterodimer). Pharmaceutically acceptable excipients are known in the art and have been amply described in a variety of publications, including, for example, A. Gennaro (2000) “Remington: The Science and Practice of Pharmacy”, 20th edition, Lippincott, Williams, & Wilkins; Pharmaceutical Dosage Forms and Drug Delivery Systems (1999) H. C. Ansel et al., eds 7^{th} ed., Lippincott, Williams, & Wilkins; and Handbook of Pharmaceutical Excipients (2000) A. H. Kibbe et al., eds., 3^{rd} ed. Amer. Pharmaceutical Assoc.

[0727] A composition of the present disclosure can include: a) one or more nucleic acids or one or more recombinant expression vectors comprising nucleotide sequences encoding a T-Cell-MP polypeptide (or all polypeptides of a T-Cell-MP) of the present disclosure; and b) one or more of: a salt, a buffer, a surfactant, an antioxidant, a hydrophilic polymer, a dextrin, a chelating agent, a suspending agent, a solubilizer, a thickening agent, a stabilizer, a bacteriostatic agent, and a preservative. Suitable buffers include, but are not limited to, (such as N,N-bis(2-hydroxyethyl)-2-aminoethanesulfonic acid (BES), bis(2-hydroxyethyl)amino-tris(hydroxymethyl)methane (BIS-Tris), N-(2-hydroxyethyl)piperazine-N′3-propanesulfonic acid (EPPS or HEPPS), glycylglycine, N-2-hydroxyehtylpiperazine-N′-2-ethanesulfonic acid (HEPES), 3-(N-morpholino)propane sulfonic acid (MOPS), piperazine-N,N′-bis(2-ethane-sulfonic acid) (PIPES), sodium bicarbonate, 3-(N-tris(hydroxymethyl)-methyl-amino)-2-hydroxy-propanesulfonic acid) TAPSO, (N-tris(hydroxymethyl)methyl-2-aminoethanesulfonic acid (TES), N-tris(hydroxymethyl)methyl-glycine (Tricine), tris(hydroxymethyl)-aminomethane (Tris), etc.). Suitable salts include, e.g., NaCl, MgCl₂, KCl, MgSO₄, etc.

[0728] A pharmaceutical formulation of the present disclosure can include a nucleic acid or recombinant expression vector of the present disclosure in an amount of from about 0.001% to about 90% (w/w). In the description of formulations, below, “subject nucleic acid or recombinant expression vector” will be understood to include a nucleic acid or recombinant expression vector of the present disclosure. For example, formulation may comprise a subject nucleic acid or subject recombinant expression vector of the present disclosure.

[0729] A subject nucleic acid or recombinant expression vector can be admixed, encapsulated, conjugated or otherwise associated with other compounds or mixtures of compounds; such compounds can include, e.g., liposomes or receptor-targeted molecules. A subject nucleic acid or recombinant expression vector can be combined in a formulation with one or more components that assist in uptake, distribution and/or absorption.

[0730] A subject nucleic acid or recombinant expression vector composition can be formulated into any of many possible dosage forms such as, but not limited to, tablets, capsules, gel capsules, liquid syrups, soft gels, suppositories, and enemas. A subject nucleic acid or recombinant expression vector composition can also be formulated as a solution or suspensions in aqueous, non-aqueous or mixed media.

[0731] A formulation comprising a subject nucleic acid or recombinant expression vector can be a liposomal formulation. As used herein, the term “liposome” includes unilamellar or multilamellar vesicles having an aqueous interior that may contain the composition (e.g., a subject nucleic acid) to be delivered. Cationic liposomes comprise positively charged lipids that can interact with negatively charged DNA molecules to form a stable complex. Liposomes that are pH sensitive or negatively charged are believed to entrap DNA rather than complex with it. Both cationic and noncationic lipids, which may form liposomes, can be used to deliver a subject nucleic acid or recombinant expression vector in vitro, ex vivo, or in vivo.

[0732] Liposomes also include “sterically stabilized” liposomes, a term which, as used herein, refers to liposomes comprising one or more specialized lipids that, when incorporated into liposomes, result in enhanced circulation lifetimes relative to liposomes lacking such specialized lipids. Examples of sterically stabilized liposomes include those comprising one or more glycolipids and those comprising lipids derivatized with one or more hydrophilic polymers (e.g., a polyethylene glycol (PEG) moiety). Liposomes and their uses are further described, for example, in U.S. Pat. No. 6,287,860.

[0733] Penetration enhancers may be included in compositions comprising a subject nucleic acid or expression vector to effect their efficient delivery of the nucleic acids. In addition to aiding the diffusion of non-lipophilic drugs such as nucleic acids across cell membranes, penetration enhancers also enhance the permeability of lipophilic drugs, such as those that may co-administered with a subject nucleic acid. Penetration enhancers may be classified as belonging to one of five broad categories, i.e., surfactants, fatty acids, bile salts, chelating agents, and non-chelating non-surfactants. Penetration enhancers and their uses are further described, for example, in U.S. Pat. No. 6,287,860.

[0734] Compositions and formulations for oral administration include powders or granules, microparticulates, nanoparticulates, suspensions or solutions in water or non-aqueous media, capsules, gel capsules, sachets, tablets, or minitablets. Thickeners, flavoring agents, diluents, emulsifiers, dispersing aids or binders may be desirable. Suitable oral formulations include those in which a subject nucleic acid is administered in conjunction with one or more penetration enhancers surfactants and chelators. Suitable surfactants include, but are not limited to, fatty acids and/or esters or salts thereof, bile acids and/or salts thereof. Suitable bile acids/salts and fatty acids and their uses are further described in U.S. Pat. No. 6,287,860. Also suitable are combinations of penetration enhancers, for example, fatty acids/salts in combination with bile acids/salts. An exemplary suitable combination is the sodium salt of lauric acid, capric acid, and UDCA. Further penetration enhancers include, but are not limited to, polyoxyethylene-9-lauryl ether, and polyoxyethylene-20-cetyl ether. Suitable penetration enhancers also include propylene glycol, dimethyl sulfoxide, triethanolamine, N,N-dimethylacetamide, N,N-dimethylformamide, 2-pyrrolidone and derivatives thereof, tetrahydrofurfuryl alcohol, and AZONE™.

### VI. Methods of Modulating Immune Responses and Treating Diseases and Disorders

[0735] T-Cell-MPs and higher order T-Cell-MP complexes (e.g., duplex T-Cell-MP) of the present disclosure are useful for modulating an activity of a T cell, and directly or indirectly modulating the activity of other cells of the immune system. The present disclosure provides methods of modulating an activity of a T cell selective for a epitope (e.g., an “epitope-specific T cell” or an “epitope selective T cell”), the methods generally involving contacting a target T cell with a T-Cell-MP-epitope conjugate or a higher order complex of T-Cell-MP-epitope conjugates (e.g., duplex T-Cell-MP-epitope conjugates) of the present disclosure. A T-Cell-MP-epitope conjugate or its higher order complexes may comprise one or more independently selected MODs that activate an epitope-specific T cell that recognizes a cancer, neoplasm, or pathogen specific antigen (e.g., a tumor, viral or bacterial antigen). In some cases, the activated T cells are cytotoxic T cells (e.g., CD8⁺ cells). Accordingly, the disclosure includes and provides for a method of treating a cancer, neoplasm (e.g., a non-malignant but inoperable tumor), or infection, the method comprising administering to an individual in need thereof an effective amount of a T-Cell-MP-epitope conjugate or a higher order complex thereof that comprises one or more independently selected MODs that activate an epitope-specific T cell that recognizes an epitope specific to the cancer, neoplasm, or pathogen (e.g., a viral or bacterial) antigen. An effective amount of such a T-Cell-MP-epitope conjugate or its higher order complex may be an amount that activates a CD8⁺ T cell specific to the conjugated epitope (e.g., increasing proliferation of the CD8⁺ T cells and/or increasing proliferation related cell signaling, increasing release of their cytotoxic agents such as granzyme, and/or inducing or enhancing release of their cytokines such as interferon γ).

[0736] A T-Cell-MP-epitope conjugate or its higher order complexes may also comprise one or more independently selected MODs that inhibit an epitope-specific T cell. Such T-Cell-MP-epitope conjugates are useful for the treatment of disease and disorders where the subject fails to make a sufficient immune response due to, for example, CD8+ T reg cell suppression as may occur in various tumors.

[0737] In addition to the foregoing, this disclosure contemplates and provides for the use of T-Cell-MPs for the delivery of MOD polypeptides. The delivery of MODs may be accomplished in epitope selective manner using a T-Cell-MP epitope conjugate, and may also be accomplished in a non-specific manner using an unconjugated T-Cell-MP. The methods of delivering MODs may be utilized in the treatment of diseases or disorders affecting mammalian subjects (e.g., human patients in need of treatment).

[0738] A. Methods of Modulating T Cell Activity

[0739] The present disclosure provides a method of selectively modulating the activity of a T cell, the method comprising contacting or administering to a subject a T-Cell-MP or a higher order complex thereof, in some instances with a payload. The contacting or administration may occur in vivo where the molecule is administered to an animal (e.g., a mammal such as a human, rat, mouse, dog, cat, pig, horse, or primate), in vitro, or ex vivo; where it may constitute all or part of a method of treating a disease or disorder as discussed further below. The T cells subject to modulation may be, for example, CD8+ T cells, a NK-T cells, and/or T reg cells. In some cases, the T cell is a CD8+ effector T cell.

[0740] The present disclosure provides a method of selectively modulating the activity of an epitope-specific T cell. The method comprises contacting the T cell with a T-Cell-MP-epitope conjugate (e.g., in duplex form) bearing an epitope recognized by the epitope-specific T-Cell. The contacting results in selectively modulating the activity of the epitope-specific T cell with the selectivity driven by the epitope and the resultant activation driven, at least in part, by the MOD polypeptide sequence of the T-Cell-MP-epitope conjugate. Contacting T cells with T-Cell-MP-epitope conjugates, or higher order T-Cell-MP complexes (e.g., duplex T-Cell-MP-epitope conjugates) can result in activation or suppression of T cells expressing a TCR specific for the conjugated epitope (an epitope-specific T cell) including induction or suppression of granule dependent and independent responses. Granule-independent responses include, but are not limited to, changes in the number or percentage of epitope-specific CD 8+ T cell (e.g., in a population of cells such as in blood, lymphatics, and/or in a target tissue), changes in the expression of Fas ligand (Fas-L, which can result in activation of caspases and target cell death through apoptosis), and cytokine/chemokine production (e.g., production and release of interferon gamma (IFN-γ). Granule-dependent effector actions include the release of granzymes, perforin, and/or granulysin. Activation of epitope-specific CD8⁺ cytotoxic T cells (e.g., CD8⁺ cytotoxic effector T cells) can result in the targeted killing of, for example, cancer cells and/or infected cells by epitope-specific T cells that recognize the epitope presented by the T-Cell-MP-epitope conjugate (or higher order complex thereof (e.g., a duplex) through granule-dependent and/or independent responses.

[0741] Contacting a T-Cell-MP-epitope conjugate or higher order complex thereof (e.g., a duplex) bearing an activating MOD, where the T-Cell-MP is conjugated to an epitope recognize by the TCR of a target T cell (an epitope specific T cell), may result in one or more of: i) proliferation of the epitope-specific T cell (e.g., CD8+ cytotoxic T cells); ii) epitope-specific induction cytotoxic activity; iii) release of one or more cytotoxic molecules (e.g., a perforin; a granzyme; a granulysin) by the epitope specific cytotoxic (e.g., CD8+) T cell. In contrast, contacting a T-Cell-MP-epitope conjugate or higher order complex thereof (e.g., a duplex) bearing an inhibitory MOD, where the T-Cell-MP is conjugated to an epitope recognize by TCR of a target T cell (an epitope specific T cell), may result in one or more of: i) suppression of proliferation and/or reduction the number of the epitope-specific T cells (e.g., CD8+ cytotoxic T cells); ii) epitope-specific suppression of a cytotoxic activity; iii) suppression the production and/or release of one or more cytotoxic molecules (e.g., a perforin; a granzyme; a granulysin) by the epitope specific cytotoxic (e.g., CD8+) T cell. Contacting a T-Cell-MP-epitope conjugate or higher order complex thereof (e.g., a duplex) conjugated to an epitope recognize by TCR of a T cell (an epitope specific T cell) and bearing an inhibitory MOD may also result in one or more of: i) epitope-specific inhibition autoreactive T cell; or ii) induction of epitope specific CD8+ T regulatory cells; and the like.

[0742] In some cases, a T-Cell-MP-epitope conjugate (or higher order complex thereof (e.g., a duplex) comprises a cancer epitope and it induces a CD8+ T cell response (e.g., a cytotoxic CD8+ T cell response to a cancer cell). In some cases, a T-Cell-MP-epitope conjugate (or higher order complex thereof (e.g., a duplex) comprises an epitope of an infectious agent, and it activates a CD8+ T cell response (e.g., a cytotoxic CD8+ T cell response) to a cell expressing an antigen of an infectious agent/pathogen.

[0743] The present disclosure provides a method of increasing the proliferation (e.g., proliferation rate) and/or the total number of CD 8+ effector T cells in an animal or tissue that are specific to the epitope presented by a T-Cell-MP epitope conjugate or higher order complex thereof (e.g., a duplex) bearing an activating MOD such as IL-2. A method of increasing T cell proliferation or numbers comprises contacting (e.g., in vitro, in vivo, or ex vivo) T cells with a T-Cell-MP-epitope conjugate or higher order a complex thereof. Contacting may occur, for example, by administering to a subject in one or more doses a T-Cell-MP-epitope conjugate). The contacting or administering may increase the number of CD8+ effector T cells having a TCR capable of binding the epitope present in the T-Cell-MP-epitope conjugate relative to the number (e.g., total number or percentage) of T cells present in a tissue (e.g., in a population of cells such as in blood, lymphatics, and/or in a target tissue such as a tumor). For example, the absolute or relative number of CD 8+ effector T cells specific to the epitope presented by the T-Cell-MP-epitope conjugate or its higher order complex (e.g., duplex) can be increased by at least 5%, at least 10%, at least 20%, at least 30%, at least 40%, at least 50%, least 75%, at least 100%, at least 2-fold, at least 2.5-fold, at least 5-fold, at least 10-fold, or more than 10-fold following one or more contacts with doses or administrations of the T-Cell-MP-epitope conjugate or a higher order complex thereof. The increase may be calculated relative the CD8+ T cell numbers present prior to the contacting or administrations, or relative to the population of T cells present in a sample (e.g., a sample of blood or tissue) that has not been contacted with the T-Cell-MP-epitope conjugate or is higher order complex.

[0744] The present disclosure provides a method of increasing granule-dependent and/or granule-independent responses of epitope-specific CD 8+ T cell comprising contacting or administering (e.g., in vitro, in vivo, or ex vivo) T cells with a T-Cell-MP-epitope conjugate or a higher order complex thereof, (e.g., with a CD80, and/or CD86 MOD). The contacting or administering may result in, for example, an increased expression of Fas ligand expression, cytokines/chemokines (e.g., IL-2, IL-4, and/or IL-5), release of interferons (e.g., IFN-γ), release of granzymes, release of perforin, and/or release of granulysin. For example, contacting a CD 8+ effector cell with a T-Cell-MP-epitope conjugate or complex thereof (e.g., a duplex) presenting epitope-specific to the effector cell can increase one or more of Fas ligand expression, interferon gamma (IFN-γ) release, granzyme release, perforin release, and/or granulysin release by at least 5%, at least 10%, at least 20%, at least 30%, at least 40%, at least 50%, least 75%, at least 100%, at least 2-fold, at least 2.5-fold, at least 5-fold, at least 10-fold, or more than 10-fold. The increase may be calculated relative the level of expression or release prior to the contacting or administrations, or relative to the population of T cells present in a sample (e.g., a sample of blood or tissue) that has not been contacted with the T-Cell-MP-epitope conjugate or a complex thereof.

[0745] Dysregulation of CD8⁺ T reg cells and self-reactive CD8⁺ effector T cells have both been associated with the pathogenesis of autoimmune diseases including, but not limited to, multiple sclerosis, Rasmussen's encephalitis, paraneoplastic syndromes, systemic sclerosis (SSc), Grave's disease (GD), systemic lupus erythematosus (SLE), aplastic anemia (AA), and vitiligo (see e.g., Pilli et al, Frontiers in Immunology, Article 652, vol. 8, June 2017; Coppieters et al, J. Exp. Med. Vol. 209 No. 1 51-60 (2012); Han et al., PNAS (USA), 110(32):13074-13078 (2013) and Pellegrino et al. PLOS ONE, https://doi.org/10.1371/journal.pone.0210839 Jan. 16, (2019). Deng et al, has reviewed the epigenetic role of CD8+ T cell in autoimmune diseases (see Deng et al, Frontiers in Immunology, Article 856, vol. 10, April 2019). CD8+ effectors may also promote autoimmune diseases via dysregulated secretion of inflammatory cytokines, skewed differentiation profiles, inappropriate apoptosis, or induction of effector T cells functions directed against target cells. In some cases, a T-Cell-MP-epitope conjugate or a higher order complex thereof (e.g., duplex) presenting a self-epitope (e.g., an antigenic determinate of a self-antigen) may reduce the activity of an autoreactive CD8+ effector T cells by direct interaction with the cell. Contacting such T-Cell-MP-epitope conjugates presenting a self-antigen and one or more independently selected inhibitory MODs (e.g., PDL1 and/or FasL) with an autoreactive CD8+ effector T cell may be employed as a means to block autoimmune disease by regulating (e.g., reducing) the release of proinflammatory molecules by such T cells and/or by eliminating self-reactive cells.

[0746] Where it is desirable to reduce the activity of epitope-specific T cells (e.g., where they are directed against a self-antigen) they may be contacted with T-Cell-MP-epitope conjugates or complexes thereof (e.g., duplexes) presenting the epitope and bearing MODs that modulate their epitope-specific response. Modulation of the cytotoxic CD8+ T cells by T-Cell-MP-epitope conjugates and their higher order complexes may result in, but is not limited to, one or more of: i) suppression of FasL expression by the T cell; ii) suppression of chemokine and/or cytokine release (e.g., IFN-γ); and/or iii) suppression of cytotoxin (e.g., a perforin; a granzyme; a granulysin) synthesis or release. The disclosure includes and provides for a method of reducing (e.g., in vivo, in vitro, or ex vivo) effector T cell activity in an epitope-specific manner, such as where the T cell is directed to a self-antigen. For example, the absolute or relative number of CD 8+ effector T cells specific to the epitope presented by the T-Cell-MP-epitope conjugate or its higher order complexes (e.g., duplex) can be decreased by at least 5%, at least 10%, at least 20%, at least 30%, at least 40%, at least 50%, or at least 75%, following one or more contacts with doses or administrations of the T-Cell-MP-epitope conjugate or a higher order complex thereof.” The method comprises contacting (such as by administering to a subject) an epitope-specific T cell with one or more doses of a T-Cell-MP-epitope conjugate or a higher order complex thereof presenting the epitope and bearing a MOD (e.g., TGF-β). The contacting or administering resulting in a reduction in one or more of: (i) FasL expression by the T cell; ii) suppression of chemokine and/or cytokine release (e.g., IFN-γ); and iii) suppression of cytotoxin (e.g., a perforin; a granzyme; a granulysin) synthesis or release by at least 5%, at least 10%, at least 20%, at least 30%, at least 40%, at least 50%, least 75%, at least 100%, at least 2-fold, at least 2.5-fold, at least 5-fold, at least 10-fold, or more than 10-fold. The change may be calculated relative the level of expression or release prior to the contacting or administrations, or relative to the population of T cells present in a sample (e.g., a sample of blood or tissue) that has not been contacted with the T-Cell-MP-epitope conjugate or a higher order complex thereof.

[0747] In other instances, a T-Cell-MP-epitope conjugate, particularly when presenting one or more IL-6 MODs, or a higher order complex thereof presenting an antigen (e.g., an epitope of a self-antigen) may interact with and increase the number or activity of CD8+ regulatory T cells (CD8+ T regs, characterized e.g., as CD8+ FOXP3+ or CD8+ FOXP3+CD25+) specific to the epitope. Various CD8⁺ T reg subsets function by, for example, secreting cytokines and chemokines, including IL-10, TGF-β, IL-16, IFN-γ and chemokine (C-C motif) ligand 4 (CCL4), and thereby suppressing the activity of effector T cells and potentially the activity of CD4+ T cells such as by the action of any of those cytokines. CD8⁺ T regs may also inhibit T cell function through cell-to-cell contact in which surface proteins such as TGF-β and cytotoxic T-lymphocyte associated protein 4 (CTLA-4) act on the T effector cell. See e.g., Yu et al. Oncol. Lett 15(6):8187-8194 (2018).

[0748] The present disclosure provides methods of increasing the number (proliferation) of epitope-specific CD8⁺ T regs directed to a self-antigen and/or the release of one or more of IL-10, TGF-β, IL-16, IFN-γ and CCL4 and thereby suppressing immune/autoimmune responses. One method of increasing the number of self-antigen specific CD8+ T regs (e.g., in a subject) comprises contacting (in vitro, ex vivo, or in vivo such as by administering to a subject) an epitope-specific T cell with one or more doses of a T-Cell-MP-epitope conjugate or a higher order complex thereof presenting the self-epitope and bearing a MOD stimulatory to CD8⁺ T reg proliferation (e.g., IL-6, see e.g., Nakagawa et al., International Immunology, Vol. 22, No. 2, pp. 129-139, (2009)), where the contacting increases proliferation of CD8+ T regs by at least 5%, at least 10%, at least 20%, at least 30%, at least 40%, at least 50%, least 75%, at least 100%, at least 2-fold, at least 2.5-fold, at least 5-fold, at least 10-fold, or more than 10-fold relative to the number of CD8⁺ T regs present in a sample (e.g., a sample of blood or tissue) that has not been contacted with the T-Cell-MP or T-Cell-MP complex.

[0749] The present disclosure also provides methods of increasing one or more of IL-10, TGF-β, IL-16, IFN-γ and CCL4 and thereby suppressing immune/autoimmune responses. The method comprising contacting (in vitro, ex vivo, or in vivo such as by administering to a subject) an epitope-specific T cell with one or more doses of a T-Cell-MP-epitope conjugate or a higher order complex thereof (e.g., a duplex) presenting the antigen and bearing a MOD stimulatory to CD8⁺ T reg cells. The contacting increases the release at least one of IL-10, TGF-β, IL-16, IFN-γ and CCL4 by at least 5%, at least 10%, at least 20%, at least 30%, at least 40%, at least 50%, least 75%, at least 100%, at least 2-fold, at least 2.5-fold, at least 5-fold, at least 10-fold, or more than 10-fold relative to the amounts prior to the contacting or relative to the population of T cells present in a sample (e.g., a sample of blood or tissue) that has not been contacted with the T-Cell-MP or T-Cell-MP complex.

[0750] Where it is desirable to eliminate epitope-specific CD8+ effectors (e.g., where they are directed against a self-antigen) they may be contacted with a T-Cell-MP-epitope conjugate or a higher order complex thereof (e.g., a duplex) presenting the epitope. The T-Cell-MP may comprise one or more MODs that lead to apoptosis and/or comprise an Ig Fc region facilitating antibody-dependent cell-mediated cytotoxicity (ADCC) and/or complement-dependent cytotoxicity (CDC) even in the absence of a MOD polypeptide sequences (e.g., a MOD-less T-Cell-MP with a wt. Ig Fc scaffold). Apoptosis may occur, for example, when the T-Cell-MP-epitope conjugate or a higher order complex thereof (e.g., a duplex) comprises both an epitope (e.g., a self-antigen) and a MOD such as FasL that induces FAS mediated apoptosis. Elimination of epitope-specific T cells may also occur as a result of antibody-dependent cell-mediated cytotoxicity (ADCC) and/or complement-dependent cytotoxicity (CDC) where the T-Cell-MP-epitope conjugate or a higher order complex thereof (e.g., a duplex) presents an epitope and comprises an immunoglobulin Fc polypeptide with wt. or enhanced ADCC and/or CDC functionality. Accordingly, this disclosure includes and provides for a method of eliminating (e.g., in vivo, in vitro, or ex vivo) effector T cells in an epitope-specific manner, such as where the T cell is directed to a self-antigen. The method comprises contacting (such as by administering to a subject in vivo, or to cells in vitro or ex vivo) an epitope-specific T cell with one or more doses of a T-Cell-MP-epitope conjugate or a higher order complex thereof (e.g., a duplex) presenting the epitope and bearing a MOD that can induce T cell apoptosis, such as TNF or Fas-L (resulting in Fas receptor (CD95) mediated cell death), and/or an Ig Fc region with ADCC or CDC activity. The contacting or administering resulting elimination of at least 5%, at least 10%, at least 20%, at least 30%, at least 40%, at least 50%, at least 75%, at least 80%, at least 85%, at least 90%, at least 95%, or 100% of the CD8+ cells specific to the epitope presented by the T-Cell-MP-epitope conjugate or a higher order complex thereof (e.g., a duplex). The change may be calculated relative the number of T cells present in a sample (e.g., a sample of blood or tissue) prior to the contacting (administration) of the T-Cell-MP-epitope conjugate or a higher order complex thereof (e.g., a duplex), or a sample that has not been contacted with the T-Cell-MP-epitope conjugate or a higher order complex thereof (e.g., a duplex).

[0751] In addition to epitope-restricted modulation of T cells, the present disclosure also provides a method of modulating the activity T cells (and other cells of the immune system) by providing immunomodulatory polypeptides in a manner unrestricted by a specific epitope. The method comprises administering to a subject or otherwise contacting cells of the immune system with an unconjugated T-Cell-MP or higher order complex thereof (e.g., a duplex T-Cell-MP) where the T-Cell-MP bears one or more MODs, or a nucleic acid encoding such an unconjugated T-Cell-MP. For example, an unconjugated T-Cell-MP bearing IL-2 and/or CD80 MODs may be utilized to effectively provide those cytokines to a subject or patient in need thereof in an epitope independent manner.

[0752] B. Methods of Selectively Delivering a MOD (Costimulatory Polypeptide)

[0753] The present disclosure provides a method of delivering a MOD (a costimulatory polypeptide) such as IL-2, 4-1BBL, CD-80, CD-86, Fas-L, PD-L1, or a reduced-affinity variant of any thereof (e.g., a PD-L1 and/or an IL-2 variant disclosed herein) to a selected T cell or a selected T cell population having a TCR specific for a given epitope. The method comprises contacting (such as by administration to a subject) a population of T cells with a T-Cell-MP-epitope conjugate or a higher order complex thereof (e.g., a duplex). The population of T cells can be a mixed population that comprises: i) the target T cell with a TCR specific to a target epitope; and ii) non-target T cells that are not specific for the target epitope (e.g., T cells that are specific for epitope(s) other than the epitope to which the epitope-specific T cell binds). The epitope-specific T cell is specific for the epitope present in and presented by the T-Cell-MP-epitope conjugate or a higher order complex thereof and binds to the peptide MHC complex provided by the T-Cell-MP epitope conjugate, thereby selectively delivering the MODs present in the T-Cell-MP-epitope conjugate to the target T cell(s). The contacting or administration may be conducted in vitro, ex vivo, or in vivo, and may constitute all or part of a method of treatment. Thus, for example, the present disclosure provides a method of delivering a costimulatory polypeptide such as PD-L1, or a reduced-affinity variant of a naturally occurring costimulatory polypeptide such as a PD-L1 variant disclosed herein, or a combination of both, selectively to a target T cell, which form part of a treatment of a disease or disorder.

[0754] By way of example, a T-Cell-MP-epitope conjugate or a higher order complex thereof (e.g., a duplex) is contacted with a population of T cells comprising: i) a target T cell(s) that is/are specific for the epitope present in the epitope conjugate; and ii) a non-target T cell(s), e.g., a T cell(s) that is specific for a second epitope(s) that is not the epitope present in the epitope conjugate. Contacting the population results in selective delivery of the MOD(s) or reduced-affinity variant MOD(s) to the target T cell. Less than 50%, less than 40%, less than 30%, less than 25%, less than 20%, less than 15%, less than 10%, less than 5%, or less than 4%, 3%, 2% or 1%, of the T-Cell-MP-epitope conjugate or higher order complex there of (e.g., duplex T-Cell-MP) may bind to non-target T cells and, as a result, the MOD(s) is/are selectively delivered to target T cell (and accordingly, substantially not delivered to the non-target T cells).

[0755] In some cases, the population of T cells to which the MOD(s) and/or variant MOD(s) is/are delivered is present in vitro or ex vivo, and a biological response (e.g., T cell activation, expansion, and/or phenotypic differentiation) of the target T cell population to the T-Cell-MP-epitope conjugate or a higher order complex thereof (e.g., a duplex) is elicited in the context of an in vitro or ex vivo setting. For example, a mixed population of T cells can be obtained from an individual and can be contacted with the T-Cell-MP-epitope conjugate or a higher order complex thereof (e.g., a duplex) in vitro or ex vivo. Such contacting can comprise single or multiple exposures of the population of T cells to a defined dose(s) and/or exposure schedule(s). In some cases, said contacting results in selectively binding/activating and/or expanding target T cells within the population of T cells, and results in generation of a population of activated and/or expanded target T cells. As an example, a mixed population of T cells can be peripheral blood mononuclear cells (PBMC). For example, PBMCs from a patient can be obtained by standard blood drawing and PBMC enrichment techniques before being exposed to 0.1-1000 nM of a T-Cell-MP-epitope conjugate or a higher order complex thereof (e.g., a duplex) under standard lymphocyte culture conditions. At time points before, during, and after exposure of the mixed T cell population at a defined dose and schedule, the abundance of target T cells in the in vitro culture can be monitored by specific peptide-MHC multimers, phenotypic markers, and/or functional activity (e.g. cytokine ELISpot assays). In some cases, upon achieving an optimal abundance and/or phenotype of antigen specific cells in vitro, all or a portion of the population of activated and/or expanded target T cells is administered to an individual (e.g., the individual from whom the mixed population of T cells was obtained as a treatment for a disease of disorder).

[0756] For example, a mixed population of T cells is obtained from an individual and is contacted with a T-Cell-MP-epitope conjugate or a higher order complex thereof (e.g., a duplex) in vitro. Such contacting, which can comprise single or multiple exposures of the T cells to a defined dose(s) and/or exposure schedule(s) in the context of in vitro cell culture, can be used to determine whether the mixed population of T cells includes T cells that are specific for the epitope presented by the T-Cell-MP-epitope conjugate or higher order complex. The presence of T cells that are specific for the epitope of the T-Cell-MP or higher order complex can be determined by assaying a sample comprising a mixed population of T cells, which population of T cells comprises T cells that are not specific for the epitope (non-target T cells) and may comprise T cells that are specific for the epitope (target T cells). Known assays can be used to detect activation and/or proliferation of the target T cells, thereby providing an ex vivo assay that can determine whether a particular T-Cell-MP-epitope conjugate or a higher order complex thereof possesses an epitope that binds to T cells present in the individual, and thus whether the epitope conjugate has potential use as a therapeutic composition for that individual. Suitable known assays for detection of activation and/or proliferation of target T cells include, e.g., flow cytometric characterization of T cell phenotype and/or antigen specificity and/or proliferation. Such an assay to detect the presence of epitope-specific T cells, e.g., a companion diagnostic, may further include additional assays (e.g. effector cytokine ELISpot assays) and/or appropriate controls (e.g. antigen-specific and antigen-nonspecific multimeric peptide-HLA staining reagents) to determine whether the T-Cell-MP-epitope conjugate or a higher order complex thereof (e.g., a duplex) is selectively binding, modulating (activating or inhibiting), and/or expanding the target T cells. Thus, for example, the present disclosure provides a method of detecting, in a mixed population of T cells obtained from an individual, the presence of a target T cell that binds an epitope of interest, the method comprising: a) contacting in vitro the mixed population of T cells with a T-Cell-MP-epitope conjugate or a higher order complex thereof (e.g., a duplex); and b) detecting modulation (activation or inhibition) and/or proliferation of T cells in response to said contacting, wherein modulation of and/or proliferation of T cells indicates the presence of the target T cell. Alternatively, or in addition, if activation and/or expansion (proliferation) of the desired T cell population is obtained using a T-Cell-MP-epitope conjugate or a higher order complex thereof (e.g., a duplex), then all or a portion of the population of T cells comprising the activated/expanded T cells can be administered back to the individual as a therapy.

[0757] In some instances, the population of T cells is in vivo in an individual. In such instances, a method of the present disclosure for selectively delivering one or more costimulatory polypeptides (e.g., IL-2 or PD-L1 or a reduced-affinity IL-2 or PD-L1) to an epitope-specific T cell comprises administering the T-Cell-MP-epitope conjugate or a higher order complex thereof (e.g., duplex) to the individual. In some instances, the epitope-specific T cell to which one or more MOD polypeptide sequences (e.g., a wild-type or reduced-affinity variant of IL-2 or PD-L1) is/are being selectively delivered is a target T cell.

[0758] C. Methods of Treatment

[0759] The present disclosure provides methods of treatment for a variety of diseases and disorders. The diseases and/or disorders that can be treated include neoplasms (e.g., non-malignant neoplasms), cancers, infections, allergies, transplant (graft) rejection, graft vs host disease, and an autoimmune diseases or disorders. The methods of treatment may comprise administering to an individual an amount of: (i) at least one T-Cell-MP (either unconjugated or as a epitope conjugate) or a higher order complex thereof (e.g., a duplex); or (ii) one or more nucleic acids or expression vectors encoding an unconjugated T-Cell-MP (which may assemble into a higher order complex). Where it is desirable to selectively modulate the activity of an epitope-specific T cell in an individual and thereby effect a method of treating a disease or condition, a T-Cell-MP-epitope conjugate or a higher order complex thereof (e.g., a duplex) may be administered to the individual. Unconjugated T-Cell-MPs or T-Cell-MP-epitope conjugates utilized in methods of treatment may comprise one or more (e.g., two or more) independently selected MOD and/or variant MOD polypeptide sequences.

[0760] Where treatment with an immunomodulatory polypeptide that is not restricted to an target epitope specific target cell population is desired, an unconjugated T-Cell-MP or a nucleic acid encoding an unconjugated T-Cell-MP may be administered to a patient or subject. One treatment method of the present disclosure comprises administering to an individual in need thereof one or more nucleic acids (e.g., a recombinant expression vectors) comprising nucleotide sequences encoding an unconjugated T-Cell-MP that may assemble into a higher order T-Cell-MP complex. Another treatment method of the present disclosure comprises administering to an individual in need thereof one or more mRNA molecules comprising nucleotide sequences encoding an unconjugated T-Cell-MPs of the present disclosure. The diseases and/or disorders that can be treated with unconjugated T-Cell-MPs include those where of the immunomodulatory action of the MOD(s) will enhance or suppress the response of cells bearing cognate co-MODs and thereby produce an immune response that alleviates disease symptoms or cures the underlying disease or disorder.

[0761] The present disclosure provides a method of selectively modulating the activity of an epitope-specific T cell in an individual, thereby effecting a treatment, the method comprising administering to the individual an effective amount of a T-Cell-MP-epitope conjugate or a higher order complex thereof (e.g., a duplex), where the administered molecule selectively modulates the activity of the epitope-specific T cell in the individual, thereby treating the disease or disorder in the individual. Thus, the present disclosure provides a treatment method comprising administering to an individual in need thereof an effective amount of a T-Cell-MP-epitope conjugate or a higher order complex thereof sufficient to effect treatment. Administering the T-Cell-MP-epitope conjugate induces an epitope-specific T cell response and may also induce an epitope-non-specific T cell response, where the ratio of the epitope-specific T cell response to the epitope-non-specific T cell response is at least 2:1. In some cases, the ratio of the epitope-specific T cell response to the epitope-non-specific T cell response is at least 5:1. In some cases, the ratio of the epitope-specific T cell response to the epitope-non-specific T cell response is at least 10:1. In some cases, the ratio of the epitope-specific T cell response to the epitope-non-specific T cell response is at least 25:1. In some cases, the ratio of the epitope-specific T cell response to the epitope-non-specific T cell response is at least 50:1. In some cases, the ratio of the epitope-specific T cell response to the epitope-non-specific T cell response is at least 100:1. In some cases, the individual is a human. In some cases, the modulating increases a cytotoxic T cell response to a cancer or infected cell, e.g., a cell expressing a virus or cancer antigen that displays the same epitope displayed by the peptide epitope present in the T-Cell-MP-epitope conjugate. As discussed below, in some cases, the administering is intravenous, subcutaneous, intramuscular, systemic, intralymphatic, distal to a treatment site, local, or at or near a treatment site the doses needed to administer an effective amount of the administered molecule are discussed herein below.

[0762] The present disclosure also includes and provides for methods of redirecting a T cell (e.g., a CD8+ effector T cell) directed to a specified epitope (e.g., a specified epitope of a CMV protein) toward a selected cell or tissue. If the patient does not have (or might not have) sufficient T cells directed to the specified epitope the method comprises an initial step of immunizing the patient to be treated with an antigen (e.g., a cytomegalovirus “CMV” protein) that induces T cells specific to the specified epitope (see FIG. 18 top section). The patient, having sufficient T cells specific to the epitope, is treated with a T-Cell-MP conjugated to the specified epitope that further comprises one or more (e.g., two or more) targeting sequences and one or more MODs. See FIG. 18 middle portion “Treatment with T-Cell-MP”. By way of example, the T-Cell-MP conjugated to the specified epitope may comprise as targeting sequences cancer targeting peptides CTP1 and/or CTP2 and a MOD (e.g., stimulatory to a cytotoxic T cell such as a wt. or variant IL-2). The T-Cell-MP-epitope conjugate bearing the targeting sequence will be localized on a target cell or tissue (e.g., a cancer cell as shown in FIG. 18 but any cell or tissue with a specific surface antigen could be targeted). Localization of the T-Cell-MP-conjugated to the specified epitope causes the localization of T-cells specific to the specified epitope, while the signal from the MOD in combination with the signal from the TCR that has now been engaged by the specified epitope presented by the T-Cell-MP, directs the T cells response (e.g., cytotoxic attack of the target cell as shown in the lower section of FIG. 18). The overall process permits the actions of a T cell to be redirected from cells or tissues expressing the specified epitope to cells or tissues that express an antigen the targeting sequence(s) recognize. Where the target is cancerous cells or tissues, it may be advantageous to use heteromeric T-Cell-MPs (e.g., heterodimers) having more than one targeting sequence directed against different antigens of the cancerous cell or tissue (e.g., CTP1 and CTP2 as in FIG. 18) to prevent the cancer's escape from the treatment by loss or mutation of the target antigen.

[0763] Any of: (i) an unconjugated T-Cell or higher order complex thereof (e.g. a duplex); (ii) one or more nucleic acids encoding an unconjugated T-Cell MP or a higher order complex thereof (e.g., a homoduplex or heteroduplex); or (iii) a T-Cell-MP-epitope conjugate or a higher order complex thereof (e.g., a homoduplex or heteroduplex) may be administered alone or with one or more additional therapeutic agents or drugs. The therapeutic agents (e.g., antibodies against check point inhibitors such as: anti-PD-1, for example Nivolumab, Cemiplimab, and Pembrolizumab; anti-PDL-1 such as Atezolizumab, Avelumab, or Durvalumab; or anti-CTLA-4, for example Ipilimumab, which, along with others, are further described below) may be administered before, during, or subsequent to T-Cell-MP administration, or the administration of nucleic acids encoding one or more unconjugated T-Cell-MP molecules. When an additional therapeutic agent or drug is administered with a composition or formulation comprising a T-Cell-MP or a higher order complex thereof (e.g., a duplex), or a nucleic acid encoding an unconjugated T-Cell-MP, the therapeutic agent or drug may be administered concurrently with any of those molecules. Alternatively, the therapeutic agents may be co-administered with the T-Cell-MP or nucleic acid as part of a single formulation or composition (e.g., a pharmaceutical composition).

[0764] Where the epitope is associated with an allergen the T-Cell-MP-epitope conjugate may be utilized in methods of treating allergic reactions. Where the epitope is associated with an infectious agent (e.g., a virus, bacterium, fungi, protozoan, or helminth), the T-Cell-MP-epitope conjugate may be utilized in methods of treatment or prophylaxis of an infection by a pathogen. Where the epitope is associated with a neoplastic or cancerous cell or tissue (e.g., an epitope of a cancer-associated antigen, neoantigen, or an antigen of a virus known to be associated with a specific cancer such as certain HPV an HBV antigens), the T-Cell-MP-epitope conjugate may be utilized in methods of treating various neoplasms or cancers.

[0765] 1 Neoplasms and Cancers

[0766] Cancers (e.g., malignant neoplasms) and neoplasms (e.g., benign neoplasms or benign tumors) that can be treated with a method of the present disclosure include any neoplasm or cancer that can be targeted with a targeting sequence, including by redirection of T cell action as described above with regard to FIG. 18. Cancers that can be treated with a method of the present disclosure include carcinomas, sarcomas, melanoma, leukemias, and lymphomas. Cancers and neoplasms that can be treated with a method of the present disclosure include solid tumors. Cancers that can be treated with a method of the present disclosure include metastatic cancers.

[0767] In some cases, a T-Cell-MP-epitope conjugate or a higher order complex thereof (e.g., a duplex) comprises (i) a cancer-specific epitope (e.g. a cancer-associated antigen), and (ii) one or more independently selected activating MOD polypeptide sequences that activates an epitope-specific T cell (e.g., activating effector functions and/or proliferation). Contacting CD8+ T cells with T-Cell-MP-epitope conjugates bearing one or two IL-2 MODs (e.g., two or four IL-2 MODs bearing H16 and/or F42 substitutions, such as H16A and/or F42A substitutions, in the duplex) can result in an expansion of T cells with a TCR specific to the presented epitope. Where the T cells are cytotoxic T cells (e.g., CD8+ cells), such a T-Cell-MP-epitope conjugate or its higher order complexes may increase the number and/or activity of a CD8+ effector T cell specific for a cancer cell or pathogen infected cell expressing the epitope. Activation of CD8+ T cells can result in increased proliferation of the CD8+ T cells and/or inducing or enhancing release of chemokines and/or cytokines by CD8+ T cells. Accordingly, the disclosure provides a method of treating a cancer or infection that includes administering to an individual in need thereof an effective amount of a T-Cell-MP-epitope conjugate or a higher order complex thereof (e.g., a duplex) comprising: (i) a cancer epitope (e.g. an epitope of a cancer-associated antigen); and (ii) one or more independently selected activating MOD polypeptide sequences that activates a T cell specific for the conjugated epitope. In some instances, an effective amount of a T-Cell-MP-epitope conjugate or a higher order complex thereof (e.g., a duplex) is an amount that increases the number or activity of CD8+ effector cells.

[0768] CD8+ T regulatory cells (T regs) have been shown to suppress antitumor immunity (see e.g., Wang, R-F. Human Immunity, 69(11): 811-814 (2008)). In cases where a T-Cell-MP-epitope conjugate or a higher order complex thereof comprises an inhibitory MOD (e.g., PD-L1, FasL, and the like) and an epitope specific to a T cell reactive toward a cancer or neoplasm it may be utilize in treatments (therapeutic methods) to reduce the proliferation and/or activity of a CD8⁺ T reg (e.g., FoxP3⁺, CD8⁺ T cells) specific to the epitope presented by the T-Cell-MP epitope conjugate. Such, treatments, which enhance antitumor immunity, may be utilized alone or in combination with other therapies for the treatment of cancers and neoplasms. Accordingly, the present disclosure provides a method of treating an individual having a cancer or neoplasm in which an individual fails to make a sufficient anti-tumor immune response due at least in part to suppression of the response by CD8+ T-reg cells. The method of treating diseases or disorders involving excess CD8+ T reg activity includes administering to an individual in need thereof an effective amount of a T-Cell-MP-epitope conjugate or a higher order complex thereof (e.g., a duplex) comprising: (i) an epitope specific to the neoplasm or cancer (e.g., an antigenic determinate of a cancer-associated antigen); and (ii) one or more independently selected inhibitory MOD polypeptide sequences that inhibit a CD8+ T reg with specificity for the epitope conjugated to the T-Cell-MP. An effective amount of such a T-Cell-MP-epitope conjugate or a higher order complex thereof may also be an amount, that when administered in one or more doses, causes a reduction in proliferation, absolute number, and/or activity (e.g., release of one or more of IL-10, TGF-β, IL-16, IFN-γ, or CCL4) of CD8+ T regs with specificity for the neoplasm or cancer epitope presented by T-Cell-MP-epitope conjugate. The reduction in CD8+ T regs with specificity for the neoplasm or cancer epitope may be at least 10%, at least 15%, at least 20%, at least 25%, at least 30%, at least 40%, at least 50%, at least 60%, at least 70%, at least 80%, at least 90%, or at least 95%, compared to number of those cells prior to administration of the T-Cell-MP-epitope conjugate or a higher order complex thereof.

[0769] The doses and routes of administration required to provide an effective amount of a T-Cell-MP to effect a treatment are discussed below.

[0770] Carcinomas that can be treated by a method disclosed herein include, but are not limited to, esophageal carcinoma, hepatocellular carcinoma, basal cell carcinoma (a form of skin cancer), squamous cell carcinoma (various tissues), bladder carcinoma, including transitional cell carcinoma (a malignant neoplasm of the bladder), bronchogenic carcinoma, colon carcinoma, colorectal carcinoma, gastric carcinoma, lung carcinoma, including small cell carcinoma and non-small cell carcinoma of the lung, adrenocortical carcinoma, thyroid carcinoma, pancreatic carcinoma, breast carcinoma, ovarian carcinoma, prostate carcinoma, adenocarcinoma, sweat gland carcinoma, sebaceous gland carcinoma, papillary carcinoma, papillary adenocarcinoma, cystadenocarcinoma, medullary carcinoma, renal cell carcinoma, ductal carcinoma in situ or bile duct carcinoma, choriocarcinoma, seminoma, embryonal carcinoma, Wilm's tumor, cervical carcinoma, uterine carcinoma, testicular carcinoma, osteogenic carcinoma, epithelial carcinoma, and nasopharyngeal carcinoma.

[0771] Sarcomas that can be treated by a method disclosed herein include, but are not limited to, fibrosarcoma, myxosarcoma, liposarcoma, chondrosarcoma, chordoma, osteogenic sarcoma, osteosarcoma, angiosarcoma, endotheliosarcoma, lymphangiosarcoma, lymphangioendotheliosarcoma, synovioma, mesothelioma, Ewing's sarcoma, leiomyosarcoma, rhabdomyosarcoma, and other soft tissue sarcomas.

[0772] Other solid tumors that can be treated by a method disclosed herein include, but are not limited to, glioma, astrocytoma, medulloblastoma, craniopharyngioma, ependymoma, pinealoma, hemangioblastoma, acoustic neuroma, oligodendroglioma, menangioma, melanoma, neuroblastoma, and retinoblastoma.

[0773] Leukemias that can be amenable to therapy by a method disclosed herein include, but are not limited to, a) chronic myeloproliferative syndromes (neoplastic disorders of multipotential hematopoietic stem cells); b) acute myelogenous leukemias (neoplastic transformation of a multipotential hematopoietic stem cell or a hematopoietic cell of restricted lineage potential; c) chronic lymphocytic leukemias (CLL; clonal proliferation of immunologically immature and functionally incompetent small lymphocytes), including B-cell CLL, T cell CLL prolymphocytic leukemia, and hairy cell leukemia; and d) acute lymphoblastic leukemias (characterized by accumulation of lymphoblasts). Lymphomas that can be treated using a subject method include, but are not limited to, B-cell lymphomas (e.g., Burkitt's lymphoma); Hodgkin's lymphoma; non-Hodgkin's lymphoma, and the like.

[0774] Other cancers that can be treated according to the methods disclosed herein include atypical meningioma, islet cell carcinoma, medullary carcinoma of the thyroid, mesenchymoma, hepatocellular carcinoma, hepatoblastoma, clear cell carcinoma of the kidney, and neurofibroma mediastinum.

[0775] As noted above, in some cases, in carrying out a subject treatment method, a T-Cell-MP-epitope conjugate or a higher order complex thereof (e.g., a duplex) of the present disclosure is administered to an individual in need thereof, as the polypeptide per se.

[0776] In addition to the administration of a T-Cell-MP-epitope conjugate, methods of treating a cancer or neoplasm may further comprising administering one or more therapeutic agents that, for example, enhance CD 8+ T cell functions (e.g., effector function) and/or otherwise treat the cancer or neoplasm or alleviate its symptoms. Accordingly, an anti-TGF-β antibody such as Metelimumab (CAT192) directed against TGF-β1 and Fresolimub directed against TGF-β1 and TGF-β2, or a TGF-β trap may be administered in conjunction with a T cell-MP-epitope conjugate for treatment of a cancer or neoplasm Treatment with an anti-TGF-β antibody may be subject to the proviso that the T-Cell-MP does not comprise an aa sequence to which the antibodies or TGF-β trap bind).

[0777] Other therapeutic agents that enhances CD 8+ function that may be administered in conjunction with a T cell-MP or a higher order complex thereof (e.g., a duplex) for the treatment of a cancer or neoplasm include, but are not limited to checkpoint inhibitors (discussed below), antibodies directed against: B lymphocyte antigens (e.g., ibritumomab, tiuxetan, obinutuzumab, ofatumumab, rituximab to CD20, brentuximab vedotin directed against CD30, and alemtuzumab to CD52); EGFR (e.g., cetuximab, panitumumab, and necitumumab); VEGF (e.g., bevacizumab); VEGFR2 (e.g., ramucirumab); HER2 (e.g., pertuzumab, trastuzumab, and ado-trastuzumab); PD-1 (e.g., nivolumab and pembrolizumab targeting a check point inhibition); RANKL (e.g., denosumab); CTLA-4 (e.g., ipilimumab targeting check point inhibition); IL-6 (e.g., siltuximab); disialoganglioside (GD2), (e.g., dinutuximab) disialoganglioside (GD2); CD38 (e.g., daratumumab); SLAMF7 (Elotuzumab); both EpCAM and CD3 (e.g., catumaxomab); or both CD19 and CD3 (e.g., blinatumomab) (optionally subject to the proviso that the T-Cell-MP or duplexed T-Cell-MP does not comprise a aa sequence to which the antibodies bind).

[0778] Chemotherapeutic agents that may be administered in conjunction with a T-Cell-MP-epitope conjugate for the treatment of cancers and neoplasms include, but are not limited to, alkylating agents, cytoskeletal disruptors (e.g., taxane), epothilones, histone deacetylase inhibitors, topoisomerase I inhibitors, topoisomerase II inhibitors, kinase inhibitors, nucleotide analog or precursor analogs, peptide antineoplastic antibiotics (e.g. bleomycin or actinomycin), platinum-based agents, retinoids, or vinca alkaloids and their derivatives. The chemotherapeutic agents may be selected from the group consisting of actinomycin all-trans retinoic acid, azacytidine, azathioprine, bleomycin, bortezomib, carboplatin, capecitabine, cisplatin, chlorambucil, cyclophosphamide, cytarabine, daunorubicin, docetaxel, doxifluridine, doxorubicin, epirubicin, epothilone, etoposide, fluorouracil, gemcitabine, hydroxyurea, idarubicin, imatinib, irinotecan, mechlorethamine, mercaptopurine, methotrexate, mitoxantrone, oxaliplatin, paclitaxel, pemetrexed, teniposide, tioguanine, topotecan, valrubicin, vemurafenib, vinblastine, vincristine, and vindesine.

[0779] 2. Immune Checkpoint Inhibitors

[0780] As noted above, one type of therapeutic agent that may be administered in conjunction with a T cell-MP or a higher order complex thereof (e.g., a duplex) for the treatment of a cancer or neoplasm is an immune checkpoint inhibitor. Exemplary immune checkpoint inhibitors include inhibitors that target immune checkpoint polypeptide such as CD27, CD28, CD40, CD122, CD96, CD73, CD47, OX40, GITR, CSF1R, JAK, PI3K delta, PI3K gamma, TAM, arginase, CD137 (also known as 4-1BB), ICOS, A2AR, B7-H3, B7-H4, BTLA, CTLA-4, LAG3, TIM3, VISTA, CD96, TIGIT, CD122, PD-1, PD-L1 and PD-L2. In some cases, the immune checkpoint polypeptide is a stimulatory checkpoint molecule selected from CD27, CD28, CD40, ICOS, OX40, GITR, CD122 and CD137. In some cases, the immune checkpoint polypeptide is an inhibitory checkpoint molecule selected from A2AR, B7-H3, B7-H4, BTLA, CTLA-4, IDO, KIR, LAG3, PD-1, TIM3, CD96, TIGIT and VISTA.

[0781] In some cases, the immune checkpoint inhibitor is an antibody specific for an immune checkpoint, e.g., a monoclonal antibody. The anti-immune checkpoint antibody may be a fully human, humanized, or de-immunized such that the antibody does not substantially elicit an immune response in a human. In some cases, the anti-immune checkpoint antibody inhibits binding of the immune checkpoint polypeptide to a ligand for the immune checkpoint polypeptide. In some cases, the anti-immune checkpoint antibody inhibits binding of the immune checkpoint polypeptide to a receptor for the immune checkpoint polypeptide.

[0782] Antibodies, e.g., monoclonal antibodies, that are specific for immune checkpoints and that function as immune checkpoint inhibitors, are known in the art. See, e.g., Wurz et al. (2016) Ther. Adv. Med. Oncol. 8:4; and Naidoo et al. (2015) Ann. Oncol. 26:2375. Suitable anti-immune checkpoint antibodies include, but are not limited to, nivolumab (Bristol-Myers Squibb), pembrolizumab (Merck), pidilizumab (Curetech), AMP-224 (GlaxoSmithKline/Amplimmune), MPDL3280A (Roche), MDX-1105 (Medarex, Inc./Bristol Myer Squibb), MEDI-4736 (Medimmune/AstraZeneca), arelumab (Merck Serono), ipilimumab (YERVOY, (Bristol-Myers Squibb), tremelimumab (Pfizer), pidilizumab (CureTech, Ltd.), IMP321 (Immutep S.A.), MGA271 (Macrogenics), BMS-986016 (Bristol-Meyers Squibb), lirilumab (Bristol-Myers Squibb), urelumab (Bristol-Meyers Squibb), PF-05082566 (Pfizer), IPH2101 (Innate Pharma/Bristol-Myers Squibb), MEDI-6469 (MedImmune/AZ), CP-870,893 (Genentech), Mogamulizumab (Kyowa Hakko Kirin), Varlilumab (CelIDex Therapeutics), Avelumab (EMD Serono), Galiximab (Biogen Idec), AMP-514 (Amplimmune/AZ), AUNP 12 (Aurigene and Pierre Fabre), Indoximod (NewLink Genetics), NLG-919 (NewLink Genetics), INCB024360 (Incyte) and combinations thereof. Suitable anti-LAG3 antibodies include, e.g., BMS-986016 and LAG525. Suitable anti-GITR antibodies include, e.g., TRX518, MK-4166, INCAGN01876, and MK-1248. Suitable anti-OX40 antibodies include, e.g., MEDI0562, INCAGN01949, GSK2831781, GSK-3174998, MOXR-0916, PF-04518600, and LAG525. Suitable anti-VISTA antibodies are provided in, e.g., WO 2015/097536.

[0783] A suitable dosage of an anti-immune checkpoint antibody is from about 1 mg/kg to about 2400 mg/kg per day, such as from about 1 mg/kg to about 1200 mg/kg per day, including from about 50 mg/kg to about 1200 mg/kg per day. Other representative dosages of such agents include about 5 mg/kg, 10 mg/kg, 15 mg/kg, 20 mg/kg, 25 mg/kg, 30 mg/kg, 35 mg/kg, 40 mg/kg, 45 mg/kg, 50 mg/kg, 60 mg/kg, 70 mg/kg, 80 mg/kg, 90 mg/kg, 100 mg/kg, 125 mg/kg, 150 mg/kg, 175 mg/kg, 200 mg/kg, 250 mg/kg, 300 mg/kg, 400 mg/kg, 500 mg/kg, 600 mg/kg, 700 mg/kg, 800 mg/kg, 900 mg/kg, 1000 mg/kg, 1100 mg/kg, 1200 mg/kg, 1300 mg/kg, 1400 mg/kg, 1500 mg/kg, 1600 mg/kg, 1700 mg/kg, 1800 mg/kg, 1900 mg/kg, 2000 mg/kg, 2100 mg/kg, 2200 mg/kg, and 2300 mg/kg per day. The effective dose of the antibody may be administered as two, three, four, five, six or more sub-doses, administered separately at appropriate intervals throughout the day.

[0784] In some cases, an immune checkpoint inhibitor is an anti-PD-1 antibody. Suitable anti-PD-1 antibodies include, e.g., nivolumab, pembrolizumab (also known as MK-3475), pidilizumab, SHR-1210, PDR001, and AMP-224. In some cases, the anti-PD-1 monoclonal antibody is nivolumab, pembrolizumab or PDR001. Suitable anti-PD1 antibodies are described in U.S. Patent Publication No. 2017/0044259. For pidilizumab, see, e.g., Rosenblatt et al. (2011) J. Immunother. 34:409-18.

[0785] In some cases, the anti-PD1 antibody is pembrolizumab. In some cases, the anti-PD-1 antibody is nivolumab (also known as MDX-1106 or BMS-936558; see, e.g., Topalian et al. (2012) N. Eng. J. Med. 366:2443-2454; and U.S. Pat. No. 8,008,449). In some cases, the anti-CTLA-4 antibody is ipilimumab or tremelimumab. For tremelimumab, see, e.g., Ribas et al. (2013) J. Clin. Oncol. 31:616-22.

[0786] In some cases, the immune checkpoint inhibitor is an anti-PD-L1 monoclonal antibody. In some cases, the anti-PD-L1 monoclonal antibody is BMS-935559, MEDI4736, MPDL3280A (also known as RG7446), or MSB0010718C. In some embodiments, the anti-PD-L1 monoclonal antibody is MPDL3280A (atezolizumab) or MEDI4736 (durvalumab). For durvalumab, see, e.g., WO 2011/066389. For atezolizumab, see, e.g., U.S. Pat. No. 8,217,149.

[0787] In some cases, the anti-PD-L1 antibody is atezolizumab.

[0788] 3 Autoimmunity and Allergic Reactions

[0789] In some cases, a T-Cell-MP-epitope conjugate or a higher order complex thereof (e.g., a duplex) comprises one or more independently selected inhibitory MOD polypeptide sequences that inhibits the activity of an epitope-specific T cell (e.g., inhibiting effector functions and/or proliferation including granule dependent and/or granule independent responses).

[0790] Accordingly, the present disclosure provides a method of treating a disease or disorder in an individual involving an active T cell response to an antigenic determinate (a specific epitope) that needs to be suppressed (e.g., an allergic reaction or an autoimmune disorder); where the method comprises administering to the individual an effective amount of a T-Cell-MP-epitope conjugate or a higher order complex thereof (e.g., a duplex) conjugated to an the specific epitope and comprising one or more independently selected MODs (e.g., wild-type and/or variant inhibitory MODs). Where the epitope is a determinate of a self-antigen, such a T-Cell-MP-epitope conjugate or its higher order complexes may selectively inhibit the activity of a self-reactive T cell. Accordingly, the present disclosure provides a method of treating an autoimmune disease or disorder in an individual, the method comprising administering to the individual an effective amount of a T-Cell-MP-epitope conjugate or a higher order complex thereof (e.g., a duplex), where the conjugated epitope is a self-epitope (epitope of a self-antigen), and where the T-Cell-MP-epitope conjugate or a higher order complex thereof (e.g., a duplex) comprises one or more independently selected MODs (e.g., wild-type and/or variant inhibitory MODs and/or variant MODs).

[0791] An “effective amount” of the T-Cell-MP-epitope conjugate or its higher order complexes may also be an amount that, when administered in one or more doses to an individual in need thereof, reduces the number of T cells that are specific to the conjugated epitope (e.g., epitope of a self-antigen or allergen) by at least 10%, at least 15%, at least 20%, at least 25%, at least 30%, at least 40%, at least 50%, at least 60%, at least 70%, at least 80%, at least 90%, or at least 95%, compared to number of self-reactive T cells in the individual before administration, or in the absence of administration of the T-Cell-MP-epitope conjugate or its higher order complex. An “effective amount” for treating a disease or disorder involving a response to specific epitope of an allergen (e.g., an allergic reaction) or self-antigen (e.g., an autoimmune reaction), may be an amount that, when administered in one or more doses to an individual in need thereof, reduces production of Th2 cytokines in the individual. In some cases, an “effective amount” of a T-Cell-MP-epitope conjugate or a higher order complex thereof (e.g., a duplex) for treating an unwanted immune response to an antigen (e.g., allergic response or autoimmune response) is an amount that, when administered in one or more doses to an individual in need thereof, ameliorates one or more symptoms associated with the unwanted immune response. An effective amount of a T-Cell-MP-epitope conjugate or a higher order complex thereof (e.g., a duplex) may be an amount that reduces the number of CD8+ self-reactive T cells. In some instances, an effective amount of a T-Cell-MP-epitope conjugate or a higher order complex thereof (e.g., a duplex) is an amount that increases the number of CD8+ T regs, which in turn reduces the number of CD8+ self-reactive T effector cells and/or the cytokines or cytotoxic components (e.g., a perforin; a granzyme; a granulysin) released by activated CD8+ effector cells. The doses and routes of administration required to provide an effective amount of a T-Cell-MP to effect a treatment are discussed below.

[0792] In addition to the administration of a T-Cell-MP-epitope conjugate, methods of treating an autoimmune disease or allergy may further comprising administering one or more therapeutic agents suppress inflammation and/or immune response including, but not limited to: cyclooxygenase inhibitors such as NSAIDs (e.g., Cox-1 and/or Cox-2 inhibitors such as celecoxib, diclofenac, diflunisal, etodolac, ibuprofen, indomethacin, ketoprofen, and naproxen); corticosteroids (e.g., cortisone, dexamethasone, hydrocortisone, ethamethasoneb, fludrocortisone, methylprednisolone, prednisone, prednisolone and triamcinolone); agents that block one or more actions of tumor necrosis factor alpha (e.g., an anti-TNF alpha such as golimumab, infliximab, certolizumab, adalimumab or a TNF alpha decoy receptor such as etanercept); agents that bind to the IL-1 receptor competitively with IL-1 (e.g., anakinra); agents that bind to the IL-6 receptor and inhibits IL-6 from signaling through the receptor (e.g., tocilizumab). The use of such agents is subject to the proviso that where they are antibodies, the T-Cell-MP does not comprise an aa sequence (e.g., a wt, MOD or variant MOD) to which the antibody binds and/or an aa sequence to which the agent binds).

[0793] 4 Infection by Pathogenic Agents

[0794] In some cases, a T-Cell-MP-epitope conjugate or a higher order complex thereof (e.g., a duplex) comprises (i) a pathogen specific epitope (e.g. an epitope of a viral or bacterial antigen), and (ii) one or more independently selected activating MOD polypeptide sequences that activate a target T cell specific to the epitope (e.g., activating granule dependent or granule independent effector functions). Where the target T cells are cytotoxic T cells (e.g., CD8+ cells), such a T-Cell-MP-epitope conjugate or its higher order complexes may increase the number and/or activity of a CD8+ effector T cell specific for an epitope expressed by pathogen infected cell or tissue. Activation of CD8+ T cells can increase proliferation of CD8+ T cells and/or induce or enhancing release of chemokines and/or cytokines by CD8+ T cells. In some instances, the epitope-specific T cell is a T cell that is specific for a peptide, phosphopeptide, or glycopeptide epitope (such as those from a spike glycoprotein, nucleoprotein, membrane protein, replicase protein, or non-structural protein of a virus, bacteria, or other pathogen), and contacting the epitope-specific T cell with the T-Cell-MP-epitope conjugate increases cytotoxic activity of the target T cell toward a pathogen infected cell or tissue.

[0795] An epitope-specific T cell may be a T cell that is specific for a virus epitope, and contacting the epitope-specific T cell with a T-Cell-MP conjugated to the virus epitope increases the number of those epitope-specific T cells and/or their cytotoxic activity towards cells infected with the virus.

[0796] Accordingly, this disclosure provides a method of treating an individual with an infection by a pathogen that includes administering to an individual in need thereof an effective amount of a T-Cell-MP-epitope conjugate or a higher order complex thereof (e.g., a duplex) comprising: (i) a pathogen specific epitope (e.g. an epitope of a viral or bacterial antigen); and (ii) one or more independently selected activating MOD polypeptide sequences that activates a T cell specific to the pathogen specific epitope. In some instances, an effective amount of a T-Cell-MP-epitope conjugate or a higher order complex thereof (e.g., a duplex) is an amount that increases the number or activity of CD8+ effector cells directed against the pathogen specific epitope.

[0797] In addition to the administration of a T-Cell-MP-epitope conjugate, methods of treating an infection (e.g., a pathogenic infection) may further comprising administering one or more therapeutic agents separately (e.g., sequentially, such as directly preceding or following the administration of the T-Cell-MP or on alternate days or weeks from the T-Cell-MP administration) or in concurrently (simultaneously or in admixture) such as one or more antibiotic, antifungal, antiviral, and/or anti-helminth agents.

[0798] 5 Transplant Rejection and Graft vs Host Disease

[0799] Patients/subjects being treated for graft vs host or transplant rejection may receive therapeutic agents in addition to the administration of a T-Cell-MP for the purposes of suppressing those immune responses. Such therapeutic agent include, but not limited to, a corticosteroid (e.g., prednisone), an anti-proliferative agent (e.g., mycophenolate) and/or a calcineurin inhibitor (e.g., cyclosporine or tacrolimus). The therapeutic agents may be administered concurrently (simultaneously or in admixture) with the T-Cell-MP or separately (e.g., sequentially, such as directly preceding or following the administration of the T-Cell-MP or on alternate days or weeks from the T-Cell-MP administration).

[0800] 6 Additional Therapeutic Agents for Use in Method of Treatment

[0801] Suitable therapeutic agents or drugs that may be administered with a T-Cell-MP or higher order T-Cell-MP complex, or a nucleic acid encoding an unconjugated T-Cell-MP, include virtually any therapeutic agent. Suitable therapeutic agents or drugs include but are not limited to, small molecule therapeutics (e.g., less than 2,000 Daltons in molecular weight) approved by the U.S. Food and Drug Administration, and/or listed in the 2020 U.S. Pharmacopeia or National Formulary. In an embodiment, those therapeutic agents or drugs are less than 1,000 molecular weight. Suitable drugs include, but are not limited to, antibiotics, chemotherapeutic (antineoplastic), anti-fungal, or anti-helminth agents and the like (e.g., sulfasalazine, azathioprine, cyclophosphamide, leflunomide; methotrexate, antimalarials, D-penicillamine, cyclosporine). Suitable chemotherapeutics may be alkylating agents, cytoskeletal disruptors (taxanes), epothilones, histone deacetylase inhibitors, topoisomerase I inhibitors, topoisomerase II inhibitors, kinase inhibitors, nucleotide analog or precursor analogs, peptide antineoplastic antibiotics (e.g. bleomycin or actinomycin), platinum-based agents, retinoids, or vinca alkaloids. Suitable drugs also include non-steroidal anti-inflammatory drugs and glucocorticoids, and the like.

[0802] In an embodiment, a suitable therapeutic agent that may be administered with a T-Cell-MP-epitope conjugate, or its higher order complexes, comprises an anti-TGF-β antibody, such as Metelimumab (CAT192) directed against TGF-β1 and/or Fresolimub directed against TGF-β1 and TGF-β2, or a TGF-β trap (e.g., Cablivi® caplacizumab-yhdp). Such antibodies would, as a generality, not be administered in conjunction with a T-Cell-MP or higher order T-Cell-MP complex that comprise a sequence to which the antibodies bind such as a TGF-β1 or TGF-β2 MOD.

[0803] In an embodiment, a suitable therapeutic agent that may be administered with a T-Cell-MP or higher order T-Cell-MP complex comprises one or more antibodies directed against: B lymphocyte antigens (e.g., ibritumomab tiuxetan, obinutuzumab, ofatumumab, rituximab to CD20, brentuximab vedotin directed against CD30, and alemtuzumab to CD52); EGFR (e.g., cetuximab, panitumumab, and necitumumab); VEGF (e.g., bevacizumab); VEGFR2 (e.g., ramucirumab); HER2 (e.g., pertuzumab, trastuzumab, and ado-trastuzumab); PD-1 (e.g., nivolumab and pembrolizumab targeting a check point inhibition); RANKL (e.g., denosumab); CTLA-4 (e.g., ipilimumab targeting check point inhibition); IL-6 (e.g., siltuximab); disialoganglioside (GD2), (e.g., dinutuximab) disialoganglioside (GD2); CD38 (e.g., daratumumab); SLAMF7 (Elotuzumab); both EpCAM and CD3 (e.g., catumaxomab); or both CD19 and CD3 (blinatumomab). Such antibodies would, as a generality, not be administered in conjunction with a T-Cell-MP or higher order T-Cell-MP complex (e.g., a duplexed T-Cell-MP) that comprise a sequence to which any of the administered antibodies bind.

[0804] A suitable therapeutic agent that may be administered with a T-Cell-MP or higher order T-Cell-MP complex, particularly for the treatment of a cancer or neoplasm, may comprises one or more chemotherapeutic agents. Such chemotherapeutic agents may be selected from: alkylating agents, cytoskeletal disruptors (e.g., taxanes), epothilones, histone deacetylase inhibitors, topoisomerase I inhibitors, topoisomerase II inhibitors, kinase inhibitors, nucleotide analogs or precursor analogs, peptide antineoplastic antibiotics (e.g. bleomycin or actinomycin), platinum-based agents, retinoids, or vinca alkaloids and their derivatives. In an embodiment, the chemotherapeutic agents are selected from actinomycin all-trans retinoic acid, azacytidine, azathioprine, bleomycin, bortezomib, carboplatin, capecitabine, cisplatin, chlorambucil, cyclophosphamide, cytarabine, daunorubicin, docetaxel, doxifluridine, doxorubicin, epirubicin, epothilone, etoposide, fluorouracil, gemcitabine, hydroxyurea, idarubicin, imatinib, irinotecan, mechlorethamine, mercaptopurine, methotrexate, mitoxantrone, oxaliplatin, paclitaxel, pemetrexed, teniposide, tioguanine, topotecan, valrubicin, vemurafenib, vinblastine, vincristine, and vindesine.

[0805] When being administered to treat a bacterial, fungal, and/or helminth infection, a suitable therapeutic agent that may be administered with a T-Cell-MP or higher order T-Cell-MP complex can comprise an antibiotic, anti-fungal, and/or anti-helminth agent.

[0806] When being administered to treat an autoimmune diseases or disorders, a suitable therapeutic agent that may be administered with a T-Cell-MP or higher order T-Cell-MP complex include, but are not limited to: an NSAID, corticosteroid (e.g., prednisone), an anti-proliferative agent (e.g., mycophenolate) and/or a calcineurin inhibitor (e.g., cyclosporine or tacrolimus).

### VII. Subjects Suitable for Treatment

[0807] Subjects suitable for treatment, e.g., by selectively delivering a MOD to a T cell or by modulating their T cell activity, include those with a cancer, infectious diseases (e.g., including those with viral, bacterial, and/or mycoplasma causative agents), graft vs host disease, transplant rejection, allergic reactions, and/or autoimmune diseases.

[0808] Subjects suitable for treatment who have a cancer include, but are not limited to, individuals who have been provided other treatments for the cancer but who failed to respond to the treatment. Cancers and neoplasms that can be treated with a method of the present disclosure include, but are not limited to, those displaying any of the cancer epitopes recited herein (see, e.g., the epitopes recited in Section I) including, but not limited to, AFP, WT-1, HPV and HBV epitopes, and those cancers and neoplasms recited in the methods of treatment described herein (see, e.g., Section VI).

[0809] Subjects suitable for treatment who have an allergy include, but are not limited to, individuals who have been provided other treatments for the allergy but who failed to respond to the treatment. Allergic conditions that can be treated with a method of the present disclosure include, but are not limited to, those resulting from exposure to nuts (e.g., tree and/or peanuts), pollen, and insect venoms (e.g., bee and/or wasp venom antigens).

[0810] Subjects suitable for treatment who have an autoimmune disease include, but are not limited to, individuals who have been provided other treatments for the autoimmune disease but who failed to respond to the treatment. Autoimmune diseases that can be treated with a method of the present disclosure include, but are not limited to, Addison's disease, alopecia areata, ankylosing spondylitis, autoimmune encephalomyelitis, autoimmune hemolytic anemia, autoimmune hepatitis, autoimmune-associated infertility, autoimmune thrombocytopenic purpura, bullous pemphigoid, Celiac Disease, Crohn's disease, Goodpasture's syndrome, glomerulonephritis (e.g., crescentic glomerulonephritis, proliferative glomerulonephritis), Grave's disease, Hashimoto's thyroiditis, mixed connective tissue disease, multiple sclerosis, myasthenia gravis (MG), pemphigus (e.g., pemphigus vulgaris), pernicious anemia, polymyositis, psoriasis, psoriatic arthritis, rheumatoid arthritis, scleroderma, Sjögren's syndrome, systemic lupus erythematosus (SLE), Type 1 diabetes, vasculitis, and vitiligo.

[0811] Subjects suitable for treatment included those who may become exposed to an infectious agent (e.g., a pathogen such as a virus, bacteria, fungus, protozoan, or helminth), those with suspected exposures, and those who have an active infection. Such subjects include, but are not limited to, individuals who have been provided other treatments for the infectious disease but who failed to respond to the treatment. Infectious diseases that can be treated with a method of the present disclosure include, but are not limited to, those having an infectious agent (e.g., a virus such as HPV, HBV, and the like) recited herein (see, e.g., Infectious Agents in Section I).

[0812] Subjects suitable for treatment include individuals that have received a transplant and that have, or at risk of an immune response to implanted tissues in the form of graft vs host disease or of transplant rejection. The subjects include, but are not limited to, individuals who have been provided other treatments but who failed to respond to the treatment. The subjects may be receiving other treatments concurrent with administration of a T-Cell-MP for the purposes of suppressing immune responses to transplanted tissues including, but not limited to, a corticosteroid (e.g., prednisone), an anti-proliferative agent (e.g., mycophenolate) and/or a calcineurin inhibitor (e.g., cyclosporine or tacrolimus).

### VIII. Dosages and Routes of Administration

[0813] A. Dosages

[0814] A suitable dosage of a T-Cell-MP (e.g., a T-Cell-MP-epitope conjugate) can be determined by an attending physician, or other qualified medical personnel, based on various clinical factors. As is well known in the medical arts, dosages for any one patient depend upon many factors, including the patient's size, body surface area, age, the particular T-Cell-MP (e.g., a T-Cell-MP-epitope conjugate) to be administered, sex of the patient, time, route of administration, general health, and other drugs being administered concurrently. Those of skill will also appreciate that dose levels can vary as a function of the specific T-Cell-MP being administered, the severity of the symptoms and the susceptibility of the subject to side effects. Preferred dosages for a given compound are readily determinable by those of skill in the art by a variety of means.

[0815] A T-Cell-MP (e.g., a T-Cell-MP-epitope conjugate) may be administered in amounts between 1 ng/kg body weight and 100 mg/kg body weight per dose, e.g., from 0.01 μg to 100 mg per kg of body weight, from 0.1 μg to 10 mg per kg of body weight, from 1 μg to 50 mg per kg of body weight, from 10 μg to 20 mg per kg of body weight, from 100 μg to 15 mg per kg of body weight, from 500 μg to 10 mg per kg of body weight (e.g., from 0.1-0.5 mg per kg of body weight, 0.5-1.0 mg per kg of body weight, 1.0 to 5.0 mg per kg of body weight, 5.0 to 10.0 mg per kg of body weight, 1.0-3.0 mg per kg of body weight, 2.0-4.0 mg per kg of body weight, 3.0-5.0 mg per kg of body weight, 4.0-6.0 mg per kg of body weight, 5.0-7.0 mg per kg of body weight, 6.0-8.0 mg per kg, 7.0-9.0 mg per kg of body weight, and 8.0-10.0 mg per kg of body weight), or from 0.5 mg/kg body weight to 5 mg/kg body weight; however, doses below or above these exemplary ranges are envisioned, especially considering the aforementioned factors. If the regimen is a continuous infusion the above-mentioned doses can be utilized, or doses can be, for example, in the range of 1 μg to 10 mg per kilogram of body weight per minute. A T-Cell-MP (e.g., a T-Cell-MP-epitope conjugate) can also be administered in an amount of from about 0.1 mg/kg body weight to 50 mg/kg body weight, e.g., from about 0.1 mg/kg body weight to about 5 mg/kg body weight, from about 5 mg/kg body weight to about 10 mg/kg body weight, from about 10 mg/kg body weight to about 20 mg/kg body weight, from about 20 mg/kg body weight to about 30 mg/kg body weight, from about 30 mg/kg body weight to about 40 mg/kg body weight, or from about 40 mg/kg body weight to about 50 mg/kg body weight. Persons of ordinary skill in the art can easily estimate repetition rates for dosing based on measured residence times and concentrations of the administered agent in bodily fluids or tissues.

[0816] Following successful treatment, it may be desirable to have the patient undergo maintenance therapy to prevent the recurrence of the disease state, wherein a T-Cell-MP (e.g., a T-Cell-MP-epitope conjugate) is administered in maintenance doses, for example, ranging from 0.01 μg to 100 mg per kg of body weight, from 0.1 μg to 100 mg per kg of body weight, from 1 μg to 50 mg per kg of body weight, from 10 μg to 20 mg per kg of body weight, from 100 μg to 15 mg per kg of body weight, or from 500 μg to 10 mg per kg of body weight (e.g., from 0.1-0.5 mg per kg, 0.5-1.0 mg per kg, 1.0-3.0 mg per kg, 2.0-4.0 mg per kg, 3.0-5.0 mg per kg, 4.0-6.0 mg per kg, 5.0-7.0 mg per kg, 6.0-8.0 mg per kg, 7.0-9.0 mg per kg, and 8.0-10.0 mg per kg).

[0817] The frequency of administration of a T-Cell-MP (e.g., a T-Cell-MP-epitope conjugate) can vary depending on any of a variety of factors, e.g., severity of the symptoms, etc. For example, in some embodiments, a T-Cell-MP is administered once every two months, once per month, twice per month, once every two weeks, three times per month, once every three weeks, every other week (qow), once every week, once per week (qw), twice per week (biw), three times per week (tiw), four times per week, five times per week, six times per week, every other day (qod), daily (qd), twice a day (qid), or three times a day (tid).

[0818] The duration of administration of a T-Cell-MP (e.g., a T-Cell-MP-epitope conjugate) of the present disclosure (e.g., the period of time over which a T-Cell-MP is administered in one or more doses) can vary depending on any of a variety of factors including patient response, etc. For example, a T-Cell-MP-epitope conjugate of the present disclosure can be administered over a period of time ranging from about one day to about one week, from about two weeks to about four weeks, from about one month to about two months, from about two months to about four months, from about four months to about six months, from about six months to about eight months, from about eight months to about 1 year, from about 1 year to about 2 years, or from about 2 years to about 4 years, or more.

[0819] B. Routes of Administration

[0820] A T-Cell-MP (e.g., an unconjugated T-Cell-MP or T-Cell-MP-epitope conjugate of the present disclosure) or a nucleic acid encoding all or part of an unconjugated T-Cell-MP may be administered to an individual using any available method and route suitable for delivery, including in vivo and ex vivo methods, as well as systemic and localized routes of administration.

[0821] A T-Cell-MP of the present disclosure may be administered to a host using any available methods and routes suitable for delivery of conventional drugs, including systemic or localized routes. In general, routes of administration contemplated for use in a method of the present disclosure include, but are not necessarily limited to, enteral, parenteral, and inhalational routes. Some acceptable routes of administration include intratumoral, peritumoral, intramuscular, intralymphatic, intratracheal, intracranial, subcutaneous, intradermal, topical, intravenous, intra-arterial, rectal, nasal, oral, and other enteral and parenteral routes of administration. Routes of administration may be combined, if desired, or adjusted depending upon the T-Cell-MP administered and/or the desired effect. A T-Cell-MP can be administered in a single dose or in multiple doses.

[0822] A T-Cell-MP (e.g., a T-Cell-MP-epitope conjugate) may be administered intravenously. In some embodiments, a T-Cell-MP is administered intramuscularly. A T-Cell-MP (e.g., a T-Cell-MP-epitope conjugate) may be administered intralymphatically. A T-Cell-MP (e.g., a T-Cell-MP-epitope conjugate) may be administered locally (e.g., pulmonary administration such as in a nebulized or other aerosolized form). A T-Cell-MP (e.g., a T-Cell-MP-epitope conjugate) may be administered intracranially. A T-Cell-MP (e.g., a T-Cell-MP-epitope conjugate) may be administered subcutaneously.

[0823] Parenteral routes of administration other than inhalation administration include, but are not necessarily limited to, topical, transdermal, subcutaneous, intramuscular, intraorbital, intracapsular, intraspinal, intrasternal, intratumoral, intralymphatic, peritumoral, and intravenous routes, i.e., any route of administration other than through the alimentary canal. Parenteral administration can be carried out to effect systemic or local delivery of a T-Cell-MP. Where systemic delivery is desired, administration typically involves invasive or systemically absorbed topical or mucosal administration of pharmaceutical preparations.

### IX. Certain Aspects

[0824] While the present invention has been described with reference to the specific embodiments thereof, it should be understood by those skilled in the art that various changes may be made, and equivalents may be substituted without departing from the true spirit and scope of the invention. In addition, many modifications may be made to adapt a particular situation, material, composition of matter, process, and/or process step or steps, to the objective, spirit and scope of the present invention. All such modifications are intended to be within the scope of the claims appended hereto.
[0825] 1. An unconjugated T cell modulatory polypeptide (T-Cell-MP), the polypeptide comprising (e.g., from N-terminus to C-terminus):
   [0826] (i) optionally one or more MOD polypeptide sequences (e.g., two or more MOD polypeptide sequences, such as in tandem, wherein when there are two or more MOD polypeptide sequences they are optionally joined to each other by independently selected L1 linkers);
   [0827] (ii) an optional L2 linker polypeptide sequence joining the one or more MOD polypeptide sequences to a β2M polypeptide sequence;
   [0828] (iii) the β2M polypeptide sequence;
   [0829] (iv) an optional L3 linker polypeptide sequence (e.g., from 10-50 aas in length);
   [0830] (v) a class I MHC-H polypeptide sequence;
   [0831] (vi) an optional L4 linker polypeptide sequence;
   [0832] (vii) a scaffold polypeptide sequence (e.g., an immunoglobulin Fc sequence);
   [0833] (viii) an optional L5 linker polypeptide sequence; and
   [0834] (ix) optionally one or more MOD polypeptide sequences (e.g., two or more MOD polypeptide sequences, such as in tandem, wherein when there are two or more MOD polypeptide sequences they are optionally joined to each other by independently selected L6 linkers);
[0835] wherein the unconjugated T-Cell-MP comprises at least one MOD polypeptide sequence (e.g., the MOD(s) of element (i) or (ix)); and
[0836] wherein at least one of the β2M polypeptide sequence, the L3 linker polypeptide sequence, and/or the MHC-H polypeptide sequence comprises one or more chemical conjugation sites for epitope conjugation.
[0837] 2. The unconjugated T-Cell-MP of aspect 1, the polypeptide comprising from N-terminus to C-terminus:
   [0838] (i) optionally one or more MOD polypeptide sequences (e.g., two or more MOD polypeptide sequences, such as in tandem, wherein when there are two or more MOD polypeptide sequences they are optionally joined to each other by independently selected L1 linkers);
   [0839] (ii) an optional L2 linker polypeptide sequence;
   [0840] (iii) a β2M polypeptide sequence;
   [0841] (iv) an optional L3 linker polypeptide sequence (e.g., from 10-50 aas in length);
   [0842] (v) a class I MHC-H polypeptide sequence;
   [0843] (vi) an optional L4 linker polypeptide sequence;
   [0844] (vii) a scaffold polypeptide sequence (e.g., an immunoglobulin Fc sequence);
   [0845] (viii) an optional L5 linker polypeptide sequence; and
   [0846] (ix) optionally one or more MOD polypeptide sequences (e.g., two or more MOD polypeptide sequences, such as in tandem, wherein when there are two or more MOD polypeptide sequences they are optionally joined to each other by independently selected L6 linkers);
[0847] wherein the unconjugated T-Cell-MP comprises at least one MOD polypeptide sequence (e.g., the MOD(s) of element (i) or (ix)); and
[0848] wherein at least one of the β2M polypeptide sequence, the L3 linker polypeptide sequence, and/or the MHC-H polypeptide sequence comprises one or more chemical conjugation sites for epitope conjugation.
[0849] The chemical conjugation site for epitope conjugation of aspects 1 and 2 permits the covalent attachment of an epitope presenting molecule (e.g., a peptide epitope) to the T-Cell-MP such that it can be bound by the MHC-H polypeptide and presented to a TCR. It is understood that the unconjugated T-Cell-MPs of aspects 1 and 2 do not comprise a peptide epitope (either covalently attached to, or as a fusion with, the T-Cell-MP polypeptide) that can be located in the binding cleft of the MHC-H/β2M polypeptide sequences and presented to a TCR.
[0850] 3. The unconjugated T-Cell-MP of aspect 1 or aspect 2, wherein the MHC-H polypeptide sequence comprises a human class I MHC-H chain polypeptide sequence selected from HLA-A, HLA-B, HLA-C, HLA-E, HLA-F, and HLA-G MHC-H polypeptide sequences having at least 85% (e.g., at least 90%, at least 95% or 98%) or 100% sequence identity to at least 200 (e.g., at least 225, at least 250, at least 260, or at least 275) contiguous aas of a MHC-H polypeptide provided in any of FIGS. 3A-3H.
[0851] 4. The unconjugated T-Cell-MP of any preceding aspect, wherein the MHC-H sequence does not include the MHC-H transmembrane domain, or a portion thereof, that will anchor the T-Cell-MP in a cell membrane.
[0852] 5. The unconjugated T-Cell-MP of any preceding aspect, wherein the MHC-H polypeptide sequence has at least 85% (e.g., at least 90%, at least 95% or 98%) or 100% sequence identity to at least 200 (e.g., at least 225, at least 250, at least 260, or at least 275) contiguous aas of the α1, α2, and α3 domains of a HLA-A allele.
[0853] 6. The unconjugated T-Cell-MP of any of aspects 1-5, wherein the MHC-H polypeptide sequence has at least 85% (e.g., at least 90%, at least 95% or 98%) or 100% sequence identity to at least 200 (e.g., at least 225, at least 250, at least 260, or at least 275) contiguous aas of a HLA-A*0101, HLA-A*0201, HLA-A*0301, HLA-A*1101, HLA-A*2301, HLA-A*2402, HLA-A*2407, HLA-A*3303, or HLA-A*3401 polypeptide sequence provided in FIG. 3E.
[0854] 7. The unconjugated T-Cell-MP of any of aspects 1-6, wherein the MHC-H polypeptide sequence has at least 85% (e.g., at least 90%, at least 95% or 98%) or 100% sequence identity to at least 200 (e.g., at least 225, at least 250, at least 260, or at least 275) contiguous aas of a HLA-A*0101, HLA-A*0201, HLA-A*1101, HLA-A*2402, HLA-A*3303, or HLA-A*3401 polypeptide sequence (e.g., as provided in FIG. 3E).
[0855] 8. The unconjugated T-Cell-MP of any of aspects 1-4, wherein the MHC-H polypeptide sequence has at least 85% (e.g., at least 90%, at least 95% or 98%) or 100% sequence identity to at least 200 (e.g., at least 225, at least 250, at least 260, or at least 275) contiguous aas of the α1, α2, and α3 domains of a HLA-B allele.
[0856] 9. The unconjugated T-Cell-MP of any of aspects 1-4 or 8, wherein the MHC-H polypeptide sequence has at least 85% (e.g., at least 90%, at least 95% or 98%) or 100% sequence identity to at least 200 (e.g., at least 225, at least 250, at least 260, or at least 275) contiguous aas of a HLA-B*0702, HLA-B*0801, HLA-B*1502, B27 (subtypes HLA-B*2701-2759), HLA-B*3802, HLA-B*4001, HLA-B*4601, or HLA-B*5301 polypeptide sequence (e.g., as provided in FIG. 3F).
[0857] 10. The unconjugated T-Cell-MP of any of aspects 1-4 or 8, wherein the MHC-H sequence has at least 85% (e.g., at least 90%, at least 95% or 98%) or 100% sequence identity to at least 200 (e.g., at least 225, at least 250, at least 260, or at least 275) contiguous aas of HLA-B*0702.
[0858] 11. The unconjugated T-Cell-MP of any of aspects 1-4, wherein the MHC-H polypeptide sequence has at least 85% (e.g., at least 90%, at least 95% or 98%) or 100% sequence identity to at least 200 (e.g., at least 225, at least 250, at least 260, or at least 275) contiguous aas of the α1, α2, and α3 domains of a HLA-C allele.
[0859] 12. The unconjugated T-Cell-MP of any of aspects 1-4 or 11, wherein the MHC-H sequence has at least 85% (e.g., at least 90%, at least 95% or 98%) or 100% sequence identity to at least 200 (e.g., at least 225, at least 250, at least 260, or at least 275) contiguous aas of a HLA-C*0102, HLA-C*0303, HLA-C*0304, HLA-C*0401, HLA-C*0602, HLA-C*0701, HLA-C*0702, HLA-C*0801, or HLA-C*1502 polypeptide sequence (e.g., as provided in FIG. 3G).
[0860] 13. The unconjugated T-Cell-MP of any of aspects 1-4 or 11, wherein the MHC-H polypeptide sequence has at least 85% (e.g., at least 90%, at least 95% or 98%) or 100% sequence identity to at least 200 (e.g., at least 225, at least 250, at least 260, or at least 275) contiguous aas of HLA-C*0701.
[0861] 14. The unconjugated T-Cell-MP of any of aspects 1-4, wherein the MHC-H polypeptide sequence has at least 85% (e.g., at least 90%, at least 95% or 98%) or 100% sequence identity to at least 200 (e.g., at least 225, at least 250, at least 260, or at least 275) contiguous aas of the α1, α2, and α3 domains of a HLA-E allele.
[0862] 15. The unconjugated T-Cell-MP of any of aspects 1-4 or 14, wherein the MHC-H polypeptide sequence has at least 85% (e.g., at least 90%, at least 95% or 98%) or 100% sequence identity to at least 200 (e.g., at least 225, at least 250, at least 260, or at least 275) contiguous aas of a HLA-E*0101, HLA-E*01:03, HLA-E*01:04, HLA-E*01:05, HLA-E*01:06, HLA-E*01:07, HLA-E*01:09, or HLA-E*01:10 polypeptide sequence (e.g., as provided in FIG. 3H).
[0863] 16. The unconjugated T-Cell-MP of any of aspects 1-4 or 14, wherein the MHC-H polypeptide sequence has at least 85% (e.g., at least 90%, at least 95% or 98%) or 100% sequence identity to at least 200 (e.g., at least 225, at least 250, at least 260, or at least 275) contiguous aas of the HLA-E allele consensus sequence:

GSHSLKYFHT SVSRPGRGEP RFISVGYVDD TQFVRFDNDA
ASPRMVPRAP WMEQEGSEYW DRETRSARDT AQIFRVNLRT
LRG [symbol] YNQSX1A GSHTLQWMHG CELGPDX2RFL RGYEQFAYDG
KDYLTLNEDL RSWTAVDT [symbol] A QISEQKSNDA SEAEHQX3X4YL
EDTCVEWLHK YLEKGKETLL HLEPPKTHVT HHPISDHEAT
LRCWALGFYP AEITLTWQQD GEGHTQDTEL VETRP [symbol] GDGT
FQKWAAVVVP SGEEX5RYTCH VQHEGLX6EPV TLRWKPASQP
TIPI,

wherein X1=K or E, X2=R or G, X3=R or G, X4=A or V, X5=Q or P, and X6=P or S. (SEQ ID NO:58)
[0864] 17. The unconjugated T-Cell-MP of any of aspects 1-4, wherein the MHC-H polypeptide sequence has at least 85% (e.g., at least 90%, at least 95% or 98%) or 100% sequence identity to at least 200 (e.g., at least 225, at least 250, at least 260, or at least 275) contiguous aas of the α1, α2, and α3 domains of a HLA-F allele.
[0865] 18. The unconjugated T-Cell-MP of any of aspects 1-4 or 17, wherein the MHC-H polypeptide sequence has at least 85% (e.g., at least 90%, at least 95% or 98%) or 100% sequence identity to at least 200 (e.g., at least 225, at least 250, at least 260, or at least 275) contiguous aas of a HLA-F*0101 (HLA-F*01:01:01:01), HLA-F*01:02, HLA-F*01:03 (HLA-F*01:03:01:01), HLA-F*01:04, HLA-F*01:05, or HLA-F*01:06. polypeptide sequence (e.g., as provided in FIG. 3H).
[0866] 19. The unconjugated T-Cell-MP of any of aspects 1-4 or 17, wherein the MHC-H polypeptide sequence has at least 85% (e.g., at least 90%, at least 95% or 98%) or 100% sequence identity to at least 200 (e.g., at least 225, at least 250, at least 260, or at least 275) contiguous aas of the HLA-F allele consensus sequence:

GSHSLRX1FST AVSRPGRGEP RYIAVEYVDD TQFLRFDSDA
AIPRMEPREX2 WVEQEGPQYW EWTTGYAKAN AQTDRVALRN
LLRRYNQSEA GSHTLQGMNG CDMGPDGRLL RGYHQHAYDG
KDYISLNEDL RSWTAADTVA QITQRFYEAE EYAEEFRTYL
EGECLELLRR YLENGKETLQ RADPPKAHVA HHPISDHEAT
LRCWALGFYP AEITLTWQRD GEEQTQDTEL VETRPAGDGT
FQKWAAVVVP X3GEEQRYTCH VQHEGLPQPL ILRWEQSX4QP TIPI,

wherein X1=Y or F; X2=P or Q; X3=S or P; and X4=P or L. (SEQ ID NO:59)
[0867] 20. The unconjugated T-Cell-MP of any of aspects 1-4, wherein the MHC-H polypeptide sequence has at least 85% (e.g., at least 90%, at least 95% or 98%) or 100% sequence identity to at least 200 (e.g., at least 225, at least 250, at least 260, or at least 275) contiguous aas of the α1, α2, and α3 domains of a HLA-G allele.
[0868] 21. The unconjugated T-Cell-MP of any of aspects 1-4 or 20, wherein the MHC-H polypeptide sequence has at least 85% (e.g., at least 90%, at least 95% or 98%) or 100% sequence identity to at least 200 (e.g., at least 225, at least 250, at least 260, or at least 275) contiguous aas of a HLA-G*01:04 (HLA-G*01:04:01:01), HLA-G*01:06, HLA-G*01:07, HLA-G*01:08, HLA-G*01:09: HLA-G*01:10, HLA-G*01:11, HLA-G*01:12, HLA-G*01:14, HLA-G*01:15, HLA-G*01:16, HLA-G*01:17, HLA-G*01:18: HLA-G*01:19, HLA-G*01:20, or HLA-G*01:22 polypeptide sequence (e.g., as provided in FIG. 3H).
[0869] 22. The unconjugated T-Cell-MP of any of aspects 1-4 or 20, wherein the MHC-H polypeptide sequence has at least 85% (e.g., at least 90%, at least 95% or 98%) or 100% sequence identity to at least 200 (e.g., at least 225, at least 250, at least 260, or at least 275) contiguous aas of the HLA-G allele consensus sequence:

GSHSMRYFSA AVX1RPGRGEP RFIAMGX2VDD X3QFX4RFDSDS
ACPRMEPRAP WVEX5EGPEYW EEETRNTKAH AQTDRMNLQT
X6RG [symbol] YNQSEA SSHTLQWMIX7 CDLX8X9DGRLX10 RGYEQYAYDG
KDYLALNEDL RSWTAADT [symbol] A QISKRKCEAA NVAEQRRAX11L
EGTCVEWLX12R X13LENGKEX14LQ RADPX15KTHVT HHPVFDYEAT
LRCWALGFYP AEIILTWQX16D GEDQTQDVEL VETRP [symbol] GDGT
FQKWAAVVVP SGEEQRYX17CH VQHEGLPEPL MLRWX18QSSLP
TIPI,

wherein X1=S or F, X2=Y or H, X3=T, S, or M, X4=L or V; X5=Q or R, X6=P or L, X7=G or D, X8=G or V, X9=S or C, X10=L or I, X11=Y or H, X12=H or R, X13=Y or H, X14=M or T, X15=P or A, X16=R, W, or Q, X17=T or M, X18=K or E. (SEQ ID NO:60)
[0870] 23. The unconjugated T-Cell-MP of any of aspects 1-22, wherein the MHC-H polypeptide sequence comprises at least one mutation (e.g., two, or three mutations) selected from the group consisting of: an alanine at position 84 (e.g., Y84A or R84A in the case of HLA-F), a cysteine at position 84 (e.g., Y84C or R84C in the case of HLA-F), a cysteine at position 139 (e.g., A139C or V139C in the case of HLA-F), and a cysteine at position 236 (e.g., A236C). See FIG. 3I for the location of those aa positions.
[0871] 24. The unconjugated T-Cell-MP of any of aspects 1-23, wherein the MHC-H polypeptide sequence comprises a combination of mutations selected from the group consisting of: Y84A and A139C; Y84A and A236C; Y84C and A139C; Y84C and A236C; and Y84C, A139C and A236C.
[0872] 25. The unconjugated T-Cell-MP of any of aspects 1-23, wherein the MHC-H polypeptide sequence comprises: a cysteine at position 84 (e.g., Y84C or R84C in the case of HLA-F), a cysteine at position 139 (e.g., A139C or V139C in the case of HLA-F), and optionally a cysteine at position 236 (e.g., A236C). See FIG. 3I for the location of those aa positions.
[0873] 26. The unconjugated T-Cell-MP of any preceding aspect, wherein the β2M sequence has at least 90% (e.g., at least 95% or 98%) or 100% sequence identity to at least 50 (e.g., 60, 70, 80, 90, 96, 97, or 98 or all) contiguous aas of a mature human β2M polypeptide (e.g., aas 21-119 of NCBI accession number NP_004039.1 provided in FIG. 4).
[0874] 27. The unconjugated T-Cell-MP of any preceding aspect, wherein the β2M sequence has up to 6 (e.g., 1, 2, 3, 4, or 5) aa substitutions within an aa segment of at least 70 (e.g., at least 80, 90, 96, 97, or 98 or all) contiguous aas of a mature human β2M polypeptide (e.g., aas 21-119 of NCBI accession number NP_004039.1 provided in FIG. 4).
[0875] 28. The unconjugated T-Cell-MP of any of aspects 1-27, wherein the unconjugated T-Cell-MP comprises at least one linker sequence comprising, consisting essentially of, or consisting of: i) Gly and/or Ser; ii) Ala and Ser; iii) Gly, Ala, and Ser; iv) Gly, Ser, and Cys (e.g., a single Cys residue); v) Ala, Ser, and Cys (e.g., a single Cys residue); or vi) Gly, Ala, Ser, and Cys (e.g., a single Cys residue).
[0876] 29. The unconjugated T-Cell-MP any of aspects 1-27, wherein the unconjugated T-Cell-MP comprises at least one linker (e.g., any of linkers L1-L6) that comprises one or more sequences selected from: polyG (e.g., polyglycine comprising 1-10 Gly residues), GA, AG, AS, SA, GS, GSGGS (SEQ ID NO:130), GGGS (SEQ ID NO:131), GGSG (SEQ ID NO:132), GGSGG (SEQ ID NO:133), GSGSG (SEQ ID NO:134), GSGGG (SEQ ID NO:135), GGGSG (SEQ ID NO:136), GSSSG (SEQ ID NO:137), GGGGS (SEQ ID NO:139), or AAAGG (SEQ ID NO:532), any of which may be repeated 2, 3, 4, 5, 6, 7, 8, 9, or 10 times.
[0877] 30. The unconjugated T-Cell-MP of any preceding aspect, wherein the unconjugated T-Cell-MP comprises at least one linker comprising a G₄S or an AAAGG sequence that may be repeated from 1-10 times (e.g., repeated 1, 2, 3, 4, 5, 6, 7, 8, 9, or 10 times).
[0878] 31. The unconjugated T-Cell-MP of any preceding aspect, wherein the scaffold polypeptide sequences are independently selected from non-interspecific sequences or interspecific sequences.
[0879] 32. The unconjugated T-Cell-MP of aspect 31, wherein the interspecific and non-interspecific sequences are selected from the group consisting of: immunoglobulin heavy chain constant regions (Ig Fc e.g., CH2-CH3); collectin polypeptides, coiled-coil domains, leucine-zipper domains; Fos polypeptides; Jun polypeptides; Ig CH1; Ig C_{L} Ig C_{L} knob-in-hole without disulfide (KiH); knob-in hole with a stabilizing disulfide bond (KiHs-s); HA-TF; ZW-1; 7.8.60; DD-KK; EW-RVT; EW-RVTs-s; and A107 sequences.
[0880] 33. The unconjugated T-Cell-MP of any preceding aspect, complexed to form a duplex T-Cell-MP or higher order T-Cell-MP comprising at least a first unconjugated T-Cell-MP and a second unconjugated T-Cell-MP of any of aspects 1-32, wherein:
   [0881] (i) the first unconjugated T-Cell-MP comprises a first β2M polypeptide sequence; a first class I MHC-H polypeptide sequence; and a first scaffold polypeptide; and
   [0882] (ii) the second unconjugated T-Cell-MP comprises a second β2M polypeptide sequence; a second class I MHC-H polypeptide sequence; and a second scaffold polypeptide; and wherein the first and second unconjugated T-Cell-MPs associate by binding interactions between the first and second scaffold polypeptides that optionally include one or more interchain covalent bonds (e.g., one or two disulfide bonds). See e.g., the duplexes in FIGS. 8 and 9.
[0883] 34. The unconjugated T-Cell-MP or duplex T-Cell-MP of any preceding aspect, wherein the scaffold comprises a non-immunoglobulin polypeptide sequence.
[0884] 35. The unconjugated T-Cell-MP or duplex T-Cell-MP of aspect 34, wherein the non-immunoglobulin polypeptide sequence is a non-interspecific polypeptide sequence (e.g., a non-interspecific coiled-coil or leucine zipper sequence).
[0885] 36. The unconjugated T-Cell-MP or duplex T-Cell-MP of aspect 34, wherein the non-immunoglobulin polypeptide sequence is an interspecific polypeptide sequence (e.g., an interspecific coiled-coil or leucine zipper sequence; Fos polypeptides that pair with Jun protein sequences; or Jun polypeptides that pair with Fos protein sequences).
[0886] 37. The unconjugated T-Cell-MP or duplex T-Cell-MP of any of aspects 1-33, wherein the scaffold comprises an immunoglobulin polypeptide sequence.
[0887] 38. The unconjugated T-Cell-MP or duplex T-Cell-MP of aspect 37, where the immunoglobulin polypeptide sequence comprises one or more substitutions that reduce the binding with Ig Fc receptors and/or complement C1q protein relative to a T-Cell-MP where the immunoglobulin polypeptide sequence is unsubstituted.
[0888] 39. The unconjugated T-Cell-MP or duplex T-Cell-MP of aspect 37 or 38, wherein the scaffold comprises a non-interspecific immunoglobulin polypeptide sequence.
[0889] 40. The unconjugated T-Cell-MP or duplex T-Cell-MP of aspect 39, wherein the non-interspecific immunoglobulin polypeptide sequence comprises a human IgA Fc, IgD Fc, or IgE Fc (e.g., comprising an aa sequence having at least about 70% (e.g., at least about 75%, 80%, 85%, 90%, 95%, 98%, or 99%) or 100% aa sequence identity to at least 125 contiguous aas (e.g., at least 150, at least 175, at least 200, or at least 210 contiguous aas) or all aas of an aa sequence of an Ig Fc region depicted in FIGS. 2A-2C.
[0890] 41. The unconjugated T-Cell-MP or duplex T-Cell-MP of aspect 39, wherein the non-interspecific immunoglobulin polypeptide sequence comprises a human IgG1 Fc, IgG2 Fc IgG3 Fc or IgG4 Fc (e.g., comprising an aa sequence having at least about 70% (e.g., at least about 75%, 80%, 85%, 90%, 95%, 98%, or 99%) or 100% aa sequence identity to at least 125 contiguous aas (e.g., at least 150, at least 175, at least 200, or at least 210 contiguous aas) or all aas of an aa sequence of an Ig Fc region depicted in FIGS. 2D-2G. For example, the non-interspecific immunoglobulin polypeptide sequence may comprise a human IgG1 Fc, IgG2 Fc IgG3 Fc or IgG4 Fc aa sequence having at least about 90% or at least about 95% aa sequence identity to at least 150 or 200 contiguous aas of an Ig Fc region depicted in FIGS. 2D-2G.
[0891] 42. The unconjugated T-Cell-MP or duplex T-Cell-MP of any of aspects 39 or 41, wherein the non-interspecific immunoglobulin polypeptide sequence comprises a human IgG1 Fc (e.g., comprising an aa sequence having at least about 70% (e.g., at least about 75%, 80%, 85%, 90%, 95%, 98%, or 99%) or 100% aa sequence identity to at least 125 contiguous aas (e.g., at least 150, at least 175, at least 200, or at least 210 contiguous aas) or all aas of an aa sequence of the wild-type (wt.) Ig Fc sequence depicted in FIG. 2D. For example the non-interspecific immunoglobulin polypeptide sequence may comprise a human IgG1 Fc (e.g., comprising an aa sequence having at least about 90% or at least about 95% aa sequence identity to at least 150 or at least 200 contiguous aas of the wild-type (wt.) Ig Fc sequence depicted in FIG. 2D (SEQ ID NO:4).
[0892] 43. The unconjugated T-Cell-MP or duplex T-Cell-MP of aspect 42, wherein the non-interspecific immunoglobulin polypeptide comprises at least one substitution at L234, L235, G236, G237, P238, S239, D270, N297, K322, P329, and/or P331 (respectively, aas L14, L15, G16, G17, P18, S19, D50, N77, K102, P109, and P111 of the wt. IgG1 aa sequence in FIG. 2D) or another substitution (e.g., a corresponding substitution) that reduces binding to the Fc receptor and/or the C1q protein relative to the same sequence without the substitutions.
[0893] 44. The unconjugated T-Cell-MP or duplex T-Cell-MP of aspect 42, comprising: (i) a substitution of N297 (e.g., N297A); (ii) a substitution of any of aas 234 to 239; (iii) a substitution at L234; (iv) a substitution at L235; (v) a substitution at L234 and L235 (e.g., an L234A and L235A or “LALA” substitution); (vi) a substitution of P331; or (vii) substitutions of D270, K322, and/or P329; substitutions at L234 and/or L235, and a substitution at P331 (e.g., L234F, L235E, and P331S substitutions).
[0894] 45. The unconjugated T-Cell-MP or duplex T-Cell-MP of aspect 39, wherein the scaffold sequence comprises an IgM heavy chain constant region.
[0895] 46. The unconjugated T-Cell-MP or duplex T-Cell-MP of any of aspects 1-33, wherein the scaffold comprises an interspecific immunoglobulin polypeptide sequence.
[0896] 47. The unconjugated T-Cell-MP or duplex T-Cell-MP of aspect 46, wherein the interspecific immunoglobulin sequence is selected from the group consisting of immunoglobulin heavy chain constant regions (Ig Fc CH2-CH3); Ig CH1; Ig C_{L} Ig C_{L} a knob-in-hole without disulfide (KiH), a knob-in hole with a stabilizing disulfide bond (KiHs-s), HA-TF, ZW-1, 7.8.60, DD-KK, EW-RVT, EW-RVTs-s, and A107 sequences.
[0897] 48. The unconjugated T-Cell-MP or duplex T-Cell-MP of aspect 46, wherein the interspecific immunoglobulin sequence comprises a KIH or a KIHs-s polypeptide sequence.
[0898] 49. The unconjugated T-Cell-MP or duplex T-Cell-MP of aspect 46, wherein the interspecific immunoglobulin comprises an EW-RVT or an EW-RVTs-s polypeptide sequence.
[0899] 50. The unconjugated T-Cell-MP or duplex T-Cell-MP of aspect 46, wherein the interspecific immunoglobulin sequence comprises a HA-TF, ZW-1, 7.8.60, DD-KK, or A107 polypeptide sequence.
[0900] 51. The unconjugated T-Cell-MP or duplex T-Cell-MP of any of aspects 46-50, further comprising one or more substitutions that reduce binding to the Fc receptor and/or the C1q protein (e.g., substitutions at IgG1 aa L234 and/or L235, or K322) relative to the same sequence without the substitutions.
[0901] 52. The unconjugated T-Cell-MP or duplex T-Cell-MP of any of aspects 46-50, further comprising one or more substitutions that limit complement activation (e.g., reduce binding to the complement C1q protein such as by substitutions at IgG D270, N297, K322, P329, and/or P331) relative to the same sequence without the substitutions.
[0902] 53. The unconjugated T-Cell-MP or duplex T-Cell-MP of any of aspects 46-52, wherein the interspecific immunoglobulin polypeptide sequence comprises a human IgG1 Fc comprising an aa sequence having at least about 70% (e.g., at least about 75%, 80%, 85%, 90%, or 95%) aa sequence identity to at least 125 contiguous aas (e.g., at least 150, at least 175, at least 200, or at least 210 contiguous aas) of the wt. Ig Gg1 Fc sequence in FIG. 2D.
[0903] 54. The unconjugated T-Cell-MP or duplex T-Cell-MP of aspect 53, wherein the interspecific immunoglobulin polypeptide sequence comprises one or more Ig Fc regions, comprising at least one substitution at L234, L235, G236, G237, P238, 5239, D270, N297, K322, P329, and/or P331 (respectively, aas L14, L15, G16, G17, P18, S19, D50, N77, K102, P109, and P111 of the wt. IgG1 aa sequence in FIG. 2D) or another substitution (e.g., a corresponding substitution) that reduces binding to the Fc receptor and/or the C1q protein relative to the same sequence without the substitutions.
[0904] 55. The unconjugated T-Cell-MP or duplex T-Cell-MP of aspect 53, comprising: (i) a substitution of N297 (e.g., N297A); (ii) a substitution of any of aas 234 to 239; (iii) a substitution at L234; (iv) a substitution at L235; (v) a substitution at L234 and L235 (e.g., an L234A and L235A or “LALA” substitution); (vi) a substitution of P331; or (vii) substitutions of D270, K322, and/or P329; substitutions at L234 and/or L235, and a substitution at P331 (e.g., L234F, L235E, and P331S substitutions).
[0905] 56. The unconjugated T-Cell-MP or duplex T-Cell-MP of any of aspects 1-55, comprising at least one (e.g., at least two, or at least three) wt. MOD or variant MOD polypeptide sequences selected independently from the group consisting of: IL-1, IL-2, IL-4, IL-6, IL-7, IL-10, IL-12, IL-15, IL-17, IL-21, IL-23, CD7, CD30L, CD40, CD70, CD80, (B7-1), CD83, CD86 (B7-2), HVEM (CD270), ILT3 (immunoglobulin-like transcript 3), ILT4(immunoglobulin-like transcript 4), Fas ligand (FasL), ICAM (intercellular adhesion molecule), ICOS-L (inducible costimulatory ligand), JAG1 (CD339), lymphotoxin beta receptor, 3/TR6, OX40L (CD252), PD-L1, PD-L2, TGF-β1, TGF-β2, TGF-β3, 4-1BBL and anti-CD28 polypeptide sequences.
[0906] 57. The unconjugated T-Cell-MP or duplex T-Cell-MP of any preceding aspect, comprising at least one (e.g., at least two, or at least three) wt. MOD or variant MOD polypeptide sequences selected independently from the group consisting of: 4-1BBL, anti-CD28, PD-L1, IL-2, CD80, CD86, OX40L (CD252), Fas ligand (FasL), ICOS-L, ICAM, CD30L, CD40, CD83, HVEM (CD270), JAG1 (CD339), CD70, CD80, CD86, TGF-β1, TGF-β2, and TGF-β3 polypeptide sequences.
[0907] 58. The unconjugated T-Cell-MP or duplex T-Cell-MP of any preceding aspect, comprising at least one (e.g., at least two, or at least three) wt. MOD or variant MOD polypeptide sequences selected independently from the group consisting of 4-1BBL, PD-L1, IL-2, CD80, CD86, FasL wt. MOD or variant MOD polypeptide sequences and anti-CD28. For example, the unconjugated T-Cell-MP or duplex T-Cell-MP may comprise at least one wt. MOD and/or variant IL-2 MOD polypeptide sequence, and at least one wt. CD80, wt. CD86, variant CD80 or variant CD86 polypeptide sequence.
[0908] 59. The unconjugated T-Cell-MP or duplex T-Cell-MP of any preceding aspect, comprising at least one wt. IL-2 or variant IL-2 MOD (e.g., comprising a H16A or T substitution and a F42A substitution) polypeptide sequence, or at least one pair of wt. IL-2 MOD or variant IL-2 MOD polypeptide sequences in tandem.
[0909] 60. The unconjugated T-Cell-MP or duplex T-Cell-MP of aspect 59, further comprising at least one: (i) wt. or variant CD80 or CD86 MOD polypeptide sequence; (ii) wt. or variant PD-L1 MOD polypeptide sequence; and/or (iii) wt. or variant FasL MOD polypeptide sequence.
[0910] 61. The unconjugated T-Cell-MP or duplex T-Cell-MP of any preceding aspect, further comprising an intrachain disulfide bond between a cysteine substituted into the carboxyl end portion of the α1 helix and a cysteine in the amino end portion of the α2-1 helix of the MHC-H polypeptide sequence.
[0911] 62. The unconjugated T-Cell-MP or duplex T-Cell-MP of any preceding aspect, comprising an intrachain disulfide bond between a cysteine substituted into the carboxyl end portion of the α1 helix at position 84 and a cysteine in the amino end portion of the α2-1 helix at position 139 of the MHC-H polypeptide sequence;
   [0912] wherein the five residue clusters amino and carboxyl to position 84 (denoted aac 1 and aac 2, respectively) and, the five residue clusters amino and carboxyl to position 139 (denoted aac 3, and aac 4 respectively) may each be substituted with 1 to 5 independently selected naturally occurring aas, and the five residue clusters amino and carboxyl to position 236 (denoted aac 5 and aac 6, respectively) may each be substituted with 1 to 5 independently selected naturally occurring aas.
[0913] 63. The unconjugated T-Cell-MP or duplex T-Cell-MP of aspect 62, wherein aac 1 to aac 6 may each be substituted with 1 to 5 independently selected naturally occurring aa other than proline.
[0914] 64. The unconjugated T-Cell-MP or duplex T-Cell-MP of aspect 62, wherein the carboxyl end portion of the α1 helix comprises a first sequence CYNQSE and the amino end portion of the α2-1 helix of the MHC-H polypeptide sequence comprises a second sequence D(M/T)CAQ, and wherein the intrachain disulfide bond is formed between the cysteines in the first and second sequences. See aac 1 to aac 4 of FIG. 3I.
[0915] 65. The duplex T-Cell-MP of any of aspects 33-64, wherein the first unconjugated T-Cell-MP and the second unconjugated T-Cell-MP are not linked by disulfide bonds.
[0916] 66. The duplex T-Cell-MP of any of aspects 33-64, wherein the first unconjugated T-Cell-MP and the second unconjugated T-Cell-MP are covalently linked by at least one (e.g., two) disulfide bond(s).
[0917] 67. The duplex T-Cell-MP of aspect 66, wherein the first unconjugated T-Cell-MP and the second unconjugated T-Cell-MP are covalently linked by at least one (e.g., two) disulfide bond(s) between the scaffold polypeptide sequences of the first T-Cell-MP and the second T-Cell-MP.
[0918] 68. The duplex T-Cell-MP of any of aspects 33-66, wherein the sequences of at least one of (e.g., both) the first unconjugated T-Cell-MP and the second unconjugated T-Cell-MP do not comprise Ig CH1 domain polypeptide sequences.
[0919] 69. The unconjugated duplex T-Cell-MP of any of aspects 33-35 and 37-45, wherein the first unconjugated T-Cell-MP and the second unconjugated T-Cell-MP are identical, and the unconjugated duplex T-Cell-MP is a homodimer. See, e.g., FIG. 6 structures A and B.
[0920] 70. The unconjugated T-Cell-MP of aspect 69, comprising at least one (e.g., at least two, or at least three) wt. MOD or variant MOD polypeptide sequence selected independently from the group consisting of: IL-1, IL-2, IL-4, IL-6, IL-7, IL-10, IL-12, IL-15, IL-17, IL-21, IL-23, CD7, CD30L, CD40, CD70, CD80, (B7-1), CD83, CD86 (B7-2), HVEM (CD270), ILT3 (immunoglobulin-like transcript 3), ILT4(immunoglobulin-like transcript 4), Fas ligand (FasL), ICAM (intercellular adhesion molecule), ICOS-L (inducible costimulatory ligand), JAG1 (CD339), lymphotoxin beta receptor, 3/TR6, OX40L (CD252), PD-L1, PD-L2, TGF-β1, TGF-β2, TGF-β3, 4-1BBL polypeptide sequences and anti-CD28.
[0921] 71. The unconjugated duplex T-Cell-MP of aspect 69, comprising at least one (e.g., at least two, or at least three) wt. MOD or variant MOD polypeptide sequence selected independently from the group consisting of: 4-1BBL, PD-L1, IL-2, CD80, CD86, FasL wt. MOD or variant MOD polypeptide sequences, and anti-CD28. For example, the unconjugated T-Cell-MP or duplex T-Cell-MP may comprise at least one IL-2 wt. MOD or variant MOD polypeptide sequence, and at least one CD80, CD86, variant CD80 or variant CD86 polypeptide sequence.
[0922] 72. The unconjugated duplex T-Cell-MP of aspect 69, comprising at least one IL-2 wt. MOD or variant MOD (e.g., comprising a H16A or T substitution and a F42A substitution) polypeptide sequence, or at least one pair of IL-2 wt. MOD or variant MOD polypeptide sequences in tandem. 73. The unconjugated duplex T-Cell-MP of aspect 69, further comprising at least one: (i) CD80 and/or CD86 wt. MOD or variant MOD polypeptide sequence; (ii) at least one PD-L1 wt. MOD or variant MOD polypeptide sequence; and/or (iii) at least one FasL wt. MOD or variant MOD polypeptide sequence.
[0923] 74. The unconjugated duplex T-Cell-MP of aspect 33-34, 36-38 and 46-68, wherein the scaffold polypeptides of the first unconjugated T-Cell-MP and the second unconjugated T-Cell-MP are a pair of interspecific polypeptide sequences and the unconjugated duplex T-Cell-MP is a heterodimer.
[0924] 75. The unconjugated duplex T-Cell-MP of aspect 74, wherein at least one (e.g., at least two) of the first unconjugated T-Cell-MP and the second unconjugated T-Cell-MP comprises at least one wt. MOD or variant MOD polypeptide sequence selected independently from the group consisting of: IL-1, IL-2, IL-4, IL-6, IL-7, IL-10, IL-12, IL-15, IL-17, IL-21, IL-23, CD7, CD30L, CD40, CD70, CD80 (B7-1), CD83, CD86 (B7-2), HVEM (CD270), ILT3 (immunoglobulin-like transcript 3), ILT4 (immunoglobulin-like transcript 4), Fas ligand (FasL), ICAM (intercellular adhesion molecule), ICOS-L (inducible costimulatory ligand), JAG1 (CD339), lymphotoxin beta receptor, 3/TR6, OX40L (CD252), PD-L1, PD-L2, TGF-β1, TGF-β2, TGF-β3, anti-CD28, and 4-1BBL polypeptide sequences.
[0925] 76. The unconjugated duplex T-Cell-MP of aspect 74, wherein at least one (e.g., at least two) of the first unconjugated T-Cell-MP and the second unconjugated T-Cell-MP comprises at least one wt. MOD or variant MOD polypeptide sequence selected independently from the group consisting of: 4-1BBL, anti-CD28, PD-L1, IL-2, CD80, CD86, and FasL wt. MOD or variant MOD polypeptide sequences. For example, the unconjugated duplex T-Cell-MP may comprise at least one IL-2 wt. MOD or variant MOD polypeptide sequence, and at least one anti-CD28, CD80, CD86, variant CD80 or variant CD86 polypeptide sequence.
[0926] 77. The unconjugated duplex T-Cell-MP of aspect 74, wherein at least one (e.g., at least two) of the first unconjugated T-Cell-MP and the second unconjugated T-Cell-MP comprises at least one IL-2 wt. MOD or variant MOD polypeptide sequence, or at least one pair of IL-2 wt. MOD or variant MOD polypeptide sequences in tandem.
[0927] 78. The unconjugated duplex T-Cell-MP of aspect 74, wherein at least one (e.g., at least two) of the first unconjugated T-Cell-MP and the second unconjugated T-Cell-MP comprises at least one: (i) CD80 and/or CD86 wt. MOD or variant MOD polypeptide sequence; (ii) at least one PD-L1 wt. MOD or variant MOD polypeptide sequence; and/or (iii) at least one FasL wt. MOD or variant MOD polypeptide sequence.
[0928] 79. The unconjugated duplex T-Cell-MP of aspect 74, wherein at least one (e.g., at least two) of the first unconjugated T-Cell-MP and the second unconjugated T-Cell-MP comprises at least one CD80 and/or CD86 wt. MOD or variant MOD polypeptide sequence.
[0929] 80. The unconjugated duplex T-Cell-MP of aspect 74, wherein at least one (e.g., at least two) of the first T-Cell-MP and the second T-Cell-MP comprises at least one PD-L1 wt. MOD or variant MOD polypeptide sequence.
[0930] 81. The unconjugated duplex T-Cell-MP of any of aspects 74-80, wherein: (i) the first unconjugated T-Cell-MP and the second unconjugated T-Cell-MP do not comprise the same MODs; (ii) the first unconjugated T-Cell-MP and the second unconjugated T-Cell-MP do not comprise the same number of MODs; or (iii) the MODs are placed in different locations of the first unconjugated T-Cell-MP and the second unconjugated T-Cell-MP.
[0931] 82. The T-Cell-MP of any of aspects 1-64, complexed to form a triplex T-Cell-MP of three heterodimers, a quadraplex T-Cell-MP of four heterodimers, a pentaplex T-Cell-MP of five heterodimers, or a hexaplex T-Cell-MP of six dimers.
[0932] 83. The unconjugated T-Cell-MP or duplex T-Cell-MP of any of aspects 1-82, wherein each chemical conjugation site is jointly or independently selected from: a) amino acid chemical conjugation sites; b) non-natural amino acids and/or selenocysteines; c) peptide sequences that act as an enzymatic modification sequence (e.g., a sulfatase motif); d) carbohydrate or oligosaccharide moieties; and/or e) IgG nucleotide binding sites.
[0933] 84. The unconjugated T-Cell-MP or duplex T-Cell-MP of any of aspects 1-83, wherein at least one (e.g., two or more) chemical conjugation site comprises an enzymatic modification sequence.
[0934] 85. The unconjugated T-Cell-MP or duplex T-Cell-MP of any of aspects 1-84, wherein at least one (e.g., two or more) chemical conjugation site comprises a sulfatase motif.
[0935] 86. The unconjugated T-Cell-MP or duplex T-Cell-MP of aspect 85, wherein the sulfatase motif comprises the sequence X1Z1X2Z2X3Z3 wherein:
[0936] Z1 is cysteine or serine; Z2 is either a proline or alanine residue; Z3 is a basic amino acid (arginine, lysine, or histidine, usually lysine), or an aliphatic amino acid (alanine, glycine, leucine, valine, isoleucine, or proline, usually A, G, L, V, or I);
[0937] X1 is present or absent and, when present, can be any amino acid, though usually an aliphatic amino acid, a sulfur-containing amino acid, or a polar, uncharged amino acid (i.e., other than an aromatic amino acid or a charged amino acid), usually L, M, V, S or T, more usually L, M, S or V, with the proviso that, when the sulfatase motif is at the N-terminus of the target polypeptide, X1 is present; and
[0938] X2 and X3 independently can be any amino acid, though usually an aliphatic amino acid, a polar, uncharged amino acid, or a sulfur containing amino acid (i.e., other than an aromatic amino acid or a charged amino acid), usually S, T, A, V, G or C, more usually S, T, A, V or G.
[0939] 87. The unconjugated T-Cell-MP or duplex T-Cell-MP of aspect 86, wherein at least one Z1 residue has been converted into an fGly amino acid residue.
[0940] 88. The unconjugated T-Cell-MP or duplex T-Cell-MP of any of aspects 1-84, wherein:
[0941] at least one (e.g., or more, two) of the chemical conjugation sites comprises a Sortase A enzyme site (e.g., comprising the amino acid sequence LP(X5)TG, LP(X5)TA, or LPETGG) positioned at the C-terminus of at least one (e.g., both) T-Cell-MP polypeptides; or
[0942] at least one of the chemical conjugation sites is a Sortase A enzyme site comprising an oligoglycine (e.g., (G)_{2, 3, 4, or 5}) or an oligo alanine (e.g., (A)_{2, 3, 4, or 5}) at the amino terminus of at least one of or both the first or second T-Cell-MP polypeptides.
[0943] 89. The unconjugated T-Cell-MP or duplex T-Cell-MP of any of aspects 1-84, wherein at least one (e.g., two or more) chemical conjugation site comprises a transglutaminase site (e.g., selected from the group consisting of: LQG, LLQGG, LLQG, LSLSQG, and LLQLQG).
[0944] 90. The unconjugated T-Cell-MP or duplex T-Cell-MP of any of aspects 1-84, wherein at least one (e.g., two or more) chemical conjugation site comprises a selenocysteine, or an amino acid sequence containing one or more independently selected non-natural amino acids.
[0945] 91. The unconjugated T-Cell-MP or duplex T-Cell-MP of aspect 90, wherein at least one of the one or more non-natural amino acids (e.g., two or more) is selected from the group consisting of para-acetylphenylalanine, para-azido phenylalanine and propynyl-tyrosine.
[0946] 92. The unconjugated T-Cell-MP or duplex T-Cell-MP of any of aspects 1-84, wherein at least one (e.g., two or more) chemical conjugation site comprises a carbohydrate, monosaccharide, disaccharide and/or oligosaccharide.
[0947] 93. The unconjugated T-Cell-MP or duplex T-Cell-MP of any of aspects 1-84, wherein at least one (e.g., two or more) chemical conjugation site comprises one or more IgG nucleotide binding sites.
[0948] 94. The unconjugated T-Cell-MP or duplex T-Cell-MP of any of aspects 1-84, wherein at least one (e.g., two or more) chemical conjugation site comprises an amino acid conjugation site (e.g., a cysteine provided in a T-Cell-MP by protein engineering of its sequence).
[0949] 95. The unconjugated T-Cell-MP or duplex T-Cell-MP of aspect 94, wherein the at least one (e.g., two or more) chemical conjugation site comprises the epsilon amino group of a lysine provided in a T-Cell MP polypeptide sequence (e.g., provided in a T-Cell-MP by protein engineering of its polypeptide sequence).
[0950] 96. The unconjugated T-Cell-MP or duplex T-Cell-MP of aspect 94, wherein the at least one (e.g., two or more) chemical conjugation site comprises a selenol group of selenocysteine and/or a sulfhydryl group of a cysteine provided in a T-Cell MP polypeptide sequence (e.g., provided in a T-Cell-MP by protein engineering of its polypeptide sequence).
[0951] 97. The unconjugated T-Cell-MP or duplex T-Cell-MP of aspect 94, wherein the at least one chemical conjugation site comprises a sulfhydryl group of a cysteine provided in a T-Cell MP polypeptide sequence, or in the polypeptide sequence of each of the first T-Cell-MP and second T-Cell-MP of a duplex T-Cell-MP (e.g., provided in a T-Cell-MP by protein engineering of the polypeptide sequence(s)).
[0952] 98. The unconjugated T-Cell-MP or duplex T-Cell-MP of any of aspects 1-97, wherein each chemical conjugation site (e.g., for the conjugation of an epitope) present in the unconjugated T-Cell-MP or duplexed unconjugated T-Cell-MP is selected to be the same (e.g., both are the sulfhydryl of a cysteine provided in the T-Cell-MP polypeptide sequences by protein engineering of the polypeptide sequences).
[0953] 99. The unconjugated T-Cell-MP or duplex T-Cell-MP of any of aspects 1-98, wherein a chemical conjugation site (e.g., for the conjugation of an epitope) is located at the N- or C-terminus of a T-Cell-MP, or, if present, attached to or within a linker located at the N- or C-terminus of the T-Cell-MP.
[0954] 100. The unconjugated T-Cell-MP or duplex T-Cell-MP of any of aspects 1-98, wherein a chemical conjugation site is located in a linker of the T-Cell-MP (e.g., an L1-L6 linker).
[0955] 101. The unconjugated T-Cell-MP or duplex T-Cell-MP of any of aspects 1-98, wherein the one or more chemical conjugation site (e.g., for the conjugation of an epitope) is/are located in the MHC-H polypeptide sequence, the β2M polypeptide sequence, or a linker sequence joining the MHC-H and β2M polypeptide sequences (the L3 linker).
[0956] 102. The unconjugated T-Cell-MP or duplex T-Cell-MP of any of aspects 1-98, wherein the one or more chemical conjugation site (e.g., for the conjugation of an epitope) is/are located in a linker sequence joining the MHC-H and β2M polypeptide sequences (the L3 linker).
[0957] 103. The unconjugated T-Cell-MP or duplex T-Cell-MP of aspect 102, where the one or more chemical conjugation site is/are sulfhydryl of a cysteine present in the linker sequence joining the MHC-H and β2M polypeptide sequences.
[0958] 104. The unconjugated T-Cell-MP or duplex T-Cell-MP of aspect 103, wherein the linker sequence joining the MHC-H and β2M polypeptide sequences further comprises a glycine, glycine and serine, alanine, alanine and serine, or alanine glycine and serine containing polypeptide sequence.
[0959] 105. The unconjugated T-Cell-MP or duplex T-Cell-MP of aspect 103, wherein the linker sequence joining the MHC-H and β2M polypeptide sequences comprises the polypeptide sequence GGGS or GGGGS.
[0960] 106. The unconjugated T-Cell-MP or duplex T-Cell-MP of aspect 103, wherein the linker sequence joining the MHC-H and β2M polypeptide sequences comprises a polypeptide sequence selected from the group consisting of: GCGGS(G4S) (SEQ ID NO:141) where the G4S unit may be repeated from 1 to 10 times (e.g., repeated 1, 2, 3, 4, 5, 6, 7, 8, 9, or 10 times),

(SEQ ID NO: 142)
GCGASGGGGSGGGGS,
(SEQ ID NO: 143)
GCGGSGGGGSGGGGSGGGGS
and
SEQ ID NO: 144)
GCGGSGGGGSGGGGS.

[0961] 107. The unconjugated T-Cell-MP or duplex T-Cell-MP of any of aspects 101-106, wherein the linker sequence joining the MHC-H and β2M polypeptide sequences (the L3 linker) comprises from 15 to 50 amino acids.
[0962] 108. The unconjugated T-Cell-MP or duplex T-Cell-MP of any of aspects 101-106, wherein the linker sequence joining the MHC-H and β2M polypeptide sequences (the L3 linker) comprises from 10 to 50 amino acids.
[0963] 109. The unconjugated T-Cell-MP or duplex T-Cell-MP of any of aspects 1-98, wherein the one or more chemical conjugation site (e.g., for the conjugation of an epitope) is/are located in the T-Cell-MP MHC-H polypeptide sequence, which has at least 85% (e.g., at least 90%, 95%, 98% or 99%, or even 100%) aa sequence identity to at least 150, 175, 200, or 225 contiguous aas of a MHC-H sequence shown in FIGS. 3A-3I.
[0964] 110. The unconjugated T-Cell-MP or duplex T-Cell-MP of aspect 109, wherein the one or more chemical conjugation sites comprise a cysteine or selenocysteine.
[0965] 111. The unconjugated T-Cell-MP or duplex T-Cell-MP of aspect 110, wherein at least one cysteine or selenocysteine chemical conjugation site is located at position 2, 5, 7, 59, 84, 116, 139, 167, 168, 170, or 171 of a MHC-H polypeptide with the numbering as in FIGS. 3D-3I.
[0966] 112. The unconjugated T-Cell-MP or duplex T-Cell-MP of any of aspects 1-98, wherein a chemical conjugation site (e.g., for the conjugation of an epitope) is located in the β2M polypeptide sequence, which has at least 85% (e.g., at least 90%, 95%, 98% or 99%, or even 100%) aa sequence identity to at least 50 (e.g., at least 60, 70, 80, 90, 96, 97, or 98 or all) contiguous aas of a mature β2M polypeptide sequence shown in FIG. 4 (e.g., the sequences shown in FIG. 4 starting at aa 21 and ending at their C-terminus).
[0967] 113. The unconjugated T-Cell-MP or duplex T-Cell-MP of aspect 112, wherein the one or more chemical conjugation sites is/are located between aas 35-55 (e.g., 40 to 50) of the mature human β2M polypeptide sequence of FIG. 4 and has 0 to 15 aa substitutions.
[0968] 114. The unconjugated T-Cell-MP or duplex T-Cell-MP of aspect 112, wherein at least one cysteine or selenocysteine chemical conjugation site is located at position 2, 44, 50, 77, 85, 88, 91, or 98 of the mature β2M polypeptides (aas 22, 64, 70, 97, 105, 108, 111, or 118 of the β2M sequences as shown in FIG. 4).
[0969] 115. The unconjugated T-Cell-MP or duplex T-Cell-MP of any of aspects 1-98, wherein a chemical conjugation site (e.g., for the conjugation of an epitope) is located in the β2M polypeptide sequence, which has 1 to 15 (e.g., 1, 2, 3, 4, 5, 6, 7, 8, 9, 10, 11, 12, 13, 14, or 15) aa deletions, insertions and/or changes compared with a mature β2M polypeptide set forth in FIG. 4 (starting at aa 21 and ending at its C-terminus).
[0970] 116. The unconjugated T-Cell-MP or duplex T-Cell-MP of any of aspects 112-115, wherein the chemical conjugation site is a cysteine.
[0971] 117. The unconjugated T-Cell-MP or duplex T-Cell-MP of any of aspects 112-115, wherein the β2M polypeptide sequence is the mature human β2M sequence of FIG. 4.
[0972] 118. The unconjugated duplex T-Cell-MP of any of aspects 33-117, wherein at least the first T-Cell-MP polypeptide sequence, and optionally the first and second T-Cell-MP polypeptide sequences comprise, from N-terminus to C-terminus:
   [0973] (i) one or more MOD polypeptide sequences optionally joined by L1 linkers;
   [0974] (ii) an L2 linker polypeptide sequence;
   [0975] (iii) a β2M polypeptide sequence;
   [0976] (iv) an L3 linker polypeptide sequence comprising from 10 to 50 (e.g., from 10 to 20, from 10 to 25, from 15 to 25, from 20 to 30, from 25 to 35, from 25 to 50, from 30 to 35, from 35 to 45, or from 40 to 50) amino acids;
   [0977] (v) a class I MHC-H polypeptide sequence comprising cysteines substituted at positions 84 and 139 (see FIGS. 3E-3H, e.g., Y84C and A139C substitutions) and forming a disulfide bond;
   [0978] (vi) an L4 linker polypeptide sequence;
   [0979] (vii) an interspecific or non-interspecific immunoglobulin Fc scaffold sequence;
   [0980] (viii) an optional L5 linker polypeptide sequence; and
   [0981] (ix) optionally one or more MOD polypeptide sequences (e.g., two or more MOD polypeptide sequences, such as in tandem, optionally joined by L6 linkers);
[0982] wherein at least one of the β2M polypeptide sequence, the L3 linker polypeptide sequence, or the MHC-H polypeptide sequence comprises a chemical conjugation site (e.g., added by protein engineering) for the direct or indirect (e.g., through a linker) covalent attachment of an epitope (e.g., a peptide, phosphopeptide, glycopeptide, lipopeptide or carbohydrate epitope); and wherein the first and second T-Cell-MPs are covalently linked through at least one disulfide bond between their Ig Fc scaffold sequences.
[0983] 119. The unconjugated duplex T-Cell-MP of any of aspects 33-117, wherein at least the first T-Cell-MP polypeptide sequence, and optionally the first and second T-Cell-MP polypeptide sequences comprise:
   [0984] (i) optionally one or more MOD polypeptide sequences optionally joined by L1 linkers;
   [0985] (ii) an optional L2 linker polypeptide sequence;
   [0986] (iii) a β2M polypeptide sequence;
   [0987] (iv) an L3 linker polypeptide sequence comprising from 10 to 50 amino acids;
   [0988] (v) a class I MHC-H polypeptide sequence comprising cysteines substituted at positions 84 and 139 (see FIGS. 3E-3H, e.g., Y84C and A139C substitutions) and forming a disulfide bond;
   [0989] (vi) an L4 linker polypeptide sequence;
   [0990] (vii) an interspecific or non-interspecific immunoglobulin Fc scaffold sequence;
   [0991] (viii) an L5 linker polypeptide sequence; and
   [0992] (ix) one or more MOD polypeptide sequences joined by L6 linker polypeptides;
[0993] wherein at least one of the β2M polypeptide sequence, the L3 linker polypeptide sequence, or the MHC-H polypeptide sequence comprises a chemical conjugation site (e.g., added by protein engineering) for the direct or indirect (e.g., through a linker) covalent attachment of an epitope (e.g., a peptide, phosphopeptide, glycopeptide, lipopeptide or carbohydrate epitope); and wherein the first and second T-Cell-MPs are covalently linked through at least one disulfide bond between their Ig Fc scaffold sequences.
[0994] 120. The unconjugated duplex T-Cell-MP of aspects 118 or 119, wherein the chemical conjugation site(s) of the first and second T-Cell-MP polypeptides is within the L3 linker.
[0995] 121. The unconjugated duplex T-Cell-MP of aspect 120, wherein the chemical conjugation site(s) of the first and second T-Cell-MP polypeptides is the sulfhydryl of a cysteine present in the L3 linker comprises, consists essentially (predominantly) of, or otherwise consists of a glycine, serine and/or alanine residues.
[0996] 122. The unconjugated duplex T-Cell-MP of aspects 118 or 119, wherein the chemical conjugation site(s) of the first and second T-Cell-MP polypeptides is within the β2M polypeptide sequence (e.g., an E44C substitution in a mature β2M polypeptide sequence provided in FIG. 4).
[0997] 123. The unconjugated duplex T-Cell-MP of aspect 122, wherein the chemical conjugation site(s) of the first and second T-Cell-MP polypeptides is the sulfhydryl of a cysteine provided at the β2M polypeptide sequence.
[0998] 124. The unconjugated duplex T-Cell-MP of aspect 123, wherein the chemical conjugation site(s) of the first and second T-Cell-MP polypeptides is the sulfhydryl of a cysteine provided at the β2M polypeptide at position 44 of a mature β2M polypeptide sequence provided in FIG. 4.
[0999] 125. The unconjugated duplex T-Cell-MP of any of aspects 118-124, wherein the one or more MOD polypeptide sequences comprise at least one (e.g., two or more) wt. IL-2 or variant IL-2 sequence (e.g., comprising a H16A or T substitution and a F42A substitution).
[1000] 126. The unconjugated duplex T-Cell-MP of any of aspects 118-125, wherein the one or more MOD polypeptide sequences comprise at least one wt. or variant CD80 or CD86 sequence.
[1001] 127. The unconjugated duplex T-Cell-MP of any of aspects 118-126, wherein the one or more MOD polypeptide sequences comprise at least one wt. or variant PD-L1 sequence.
[1002] 128. The unconjugated duplex T-Cell-MP of any of aspects 118-127, wherein the one or more MOD polypeptide sequences comprise at least one wt. or variant 4-1BBL or PD-L1 sequence.
[1003] 129. The unconjugated duplex T-Cell-MP of any of aspects 118-128, wherein:
   [1004] (i) the immunoglobulin Fc scaffold is non-interspecific scaffold polypeptide and the duplex is a homodimer comprising identical first and second T-Cell-MP polypeptides; or
   [1005] (ii) the first and second scaffold polypeptides are an interspecific pair of immunoglobulin Fc scaffold polypeptides (e.g., a KIH or KIH-ss pair), and the duplex is a heterodimer.
[1006] 130. The unconjugated duplex T-Cell-MP of aspect 129, wherein the first and second scaffold polypeptides are an interspecific pair of immunoglobulin Fc scaffold polypeptides, and the first T-Cell-MP polypeptide sequence comprises at least one MOD polypeptide sequence not present in the second T-Cell-MP polypeptide sequence.
[1007] 131. The unconjugated T-Cell-MP or duplex T-Cell-MP of any preceding aspect further comprising an additional peptide and/or a payload covalently linked to a T-Cell-MP.
[1008] 132. The unconjugated T-Cell-MP or duplex T-Cell-MP of aspect 131, wherein the additional peptide is an epitope tag or an affinity domain.
[1009] 133. The unconjugated T-Cell-MP or duplex T-Cell-MP of aspect 131, wherein the additional peptide is a targeting sequence.
[1010] 134. The unconjugated T-Cell-MP or duplex T-Cell-MP of aspect 133, wherein the targeting sequence is an antibody or an antigen binding fragment thereof, or a single chain T cell receptor.
[1011] 135. The unconjugated T-Cell-MP or duplex T-Cell-MP of any of aspects 132-133, wherein the targeting sequence is directed to a protein or non-protein epitope of an infectious agent.
[1012] 136. The unconjugated T-Cell-MP or duplex T-Cell-MP of aspect 135, where the infectious agent is a virus, bacteria, fungus, protozoa, or helminth.
[1013] 137. The unconjugated T-Cell-MP or duplex T-Cell-MP of any of aspects 132-133, wherein the targeting sequence is directed to a self-antigen or allergen.
[1014] 138. The unconjugated T-Cell-MP or duplex T-Cell-MP of any of aspects 132-133, wherein the targeting sequence is directed to a cancer-associated antigen (“CAA”).
[1015] 139. The unconjugated T-Cell-MP or duplex T-Cell-MP of aspect 138, wherein the cancer associated antigen is selected from those recited in Section I.A.7.b.i.(a) “Cancer-Associated Antigens “CAAs”.
[1016] 140. The unconjugated T-Cell-MP or duplex T-Cell-MP of aspect 138, wherein the targeting sequence is selected from the group consisting of an anti-CD51, anti-CD74, anti-CD22, anti-CD20, anti-CD20, anti-CD22, anti-CD38, anti-PD-1 receptor, anti-CTLA-4, anti-TROP-2, anti-mucin, anti-CEA, anti-CEACAM6, anti-colon-specific antigen-p, anti-alpha-fetoprotein, anti-IGF-1R, anti-CD19, anti-PSMA, anti-PSMA dimer, anti-carbonic anhydrase IX, anti-HLA-DR, anti-CD52, anti-EpCAM, anti-VEGF, anti-EGFR, anti-CD33, anti-HER2, anti-CD79b, anti-BCMA, and anti-mesothelin antibody or antigen binding fragment thereof.
[1017] 141. The unconjugated T-Cell-MP or duplex T-Cell-MP of aspect 138, wherein the CAA is a peptide presented by an HLA as a peptide/HLA complex. See Section I.A.7.b.i.(b) “Peptide/HLA Complexes.”
[1018] 142. The unconjugated T-Cell-MP or duplex T-Cell-MP of aspect 138, wherein the targeting sequence is selected from an anti-HER2, anti-CD19, anti-mesothelin, anti-TROP2, anti-BCMA, anti-MUC-1, anti-MUC16, or anti-Claudin antibody or antigen binding fragment thereof. See Section I.A.7.b.ii at (a) though (h).
[1019] 143. The unconjugated T-Cell-MP or duplex T-Cell-MP of any preceding aspect further comprising a payload covalently attached to a T-Cell-MP.
[1020] 144. The unconjugated T-Cell-MP or duplex T-Cell-MP of aspect 143, wherein the payload is a therapeutic agent, chemotherapeutic agent, diagnostic agent, or label.
[1021] 145. The unconjugated T-Cell-MP or duplex T-Cell-MP of any preceding aspect, wherein at least one T-Cell-MP is conjugated to a non-peptide or peptide epitope at the chemical conjugation site in the β2M polypeptide sequence, the L3 polypeptide sequence, and/or the MHC-H polypeptide sequence to form a T-Cell-MP-epitope conjugate or a higher order T-Cell-MP-epitope conjugate complex, such as a duplex T-Cell-MP-epitope conjugate.
[1022] 146. The T-Cell-MP-epitope conjugate or duplex T-Cell-MP-epitope conjugate of aspect 145, wherein the epitope is a cancer epitope, infectious agent epitope, self-epitope (autoantigen), or allergen epitope.
[1023] 147. The T-Cell-MP-epitope conjugate or duplex T-Cell-MP-epitope conjugate of any of aspects 145-146, wherein the epitope is a peptide, glycopeptide, phosphopeptide, or lipopeptide that comprises from about 4 aas (aa) to about 25 aa (e.g., the epitope can have a length of from 4 aa to about 10 aa, from about 6 aa to about 12 aa, from about 10 aa to about 15 aa, from about 15 aa to about 20 aa, or from about 20 aa to about 25 aa).
[1024] 148. The T-Cell-MP-epitope conjugate or duplex T-Cell-MP-epitope conjugate of aspect 147, wherein the peptide epitope is from about 6 aa to about 12 aa.
[1025] 149. The T-Cell-MP-epitope conjugate or duplex T-Cell-MP-epitope conjugate of any of aspects 145-148, wherein the epitope is a cancer epitope.
[1026] 150. The T-Cell-MP-epitope conjugate or duplex T-Cell-MP-epitope conjugate of aspect 149, wherein the cancer epitope is set forth in section I.A.8.d.i “Epitopes present in cancers—Cancer-Associated Antigens (“CAAs”).”
[1027] 151. The T-Cell-MP-epitope conjugate or duplex T-Cell-MP-epitope conjugate of aspect 150, wherein the cancer epitope is an Alpha Feto Protein (AFP) epitope set forth in section I.A.8.d.i(a) “Alpha Feto Protein (AFP)”.
[1028] 152. The T-Cell-MP-epitope conjugate or duplex T-Cell-MP-epitope conjugate of aspect 150, wherein the cancer epitope is an epitope of Wilms Tumor Antigen (WT-1) protein set forth in section I.A.8.d.i(b) “Wilms Tumor Antigen (WT-1)”.
[1029] 153. The T-Cell-MP-epitope conjugate or duplex T-Cell-MP-epitope conjugate of aspect 150, wherein the cancer epitope is a Human Papilloma Virus I (HPV) epitope set forth in section I.A.8.d.i(c) “Human Papilloma Virus I (HPV)”.
[1030] 154. The T-Cell-MP-epitope conjugate or duplex T-Cell-MP-epitope conjugate of aspect 150, wherein the cancer epitope is a Hepatitis B Virus (HBV) epitope set forth in section I.A.8.d.i(d) “Hepatitis B Virus (HBV)”.
[1031] 155. The T-Cell-MP-epitope conjugate or duplex T-Cell-MP-epitope conjugate of any of aspects 145-148, wherein the epitope is a self-epitope.
[1032] 156. The T-Cell-MP-epitope conjugate or duplex T-Cell-MP-epitope conjugate of any of aspects 145-148, wherein the epitope is an epitope of an allergen (e.g., an allergic protein).
[1033] 157. The T-Cell-MP-epitope conjugate or duplex T-Cell-MP-epitope conjugate of aspect 156, wherein the allergen is selected from protein or non-protein components of: nuts (e.g., tree and/or peanuts), glutens, pollens, eggs (e.g. chicken, Gallus domesticus), shellfish, soy, fish, and insect venoms (e.g., bee and/or wasp venom antigens).
[1034] 158. The T-Cell-MP-epitope conjugate or duplex T-Cell-MP-epitope conjugate of any of aspects 145-148, wherein the epitope is an epitope presented by an infectious agent.
[1035] 159. The T-Cell-MP-epitope conjugate or duplex T-Cell-MP-epitope conjugate of aspect 158, wherein the infectious agent is a virus, bacterium, fungus, protozoan, or helminth 160. The T-Cell-MP-epitope conjugate or duplex T-Cell-MP-epitope conjugate of any of aspects 145-159, wherein the infectious agent is a virus and the epitope is an epitope presented by a viral infectious disease agent (e.g., a virus set forth in section I.A.8.d.ii “Infectious Agents”).
[1036] 161. A method of treatment or prophylaxis of a disease (e.g., a cancer or infection) or condition (e.g., an allergy) comprising:
   [1037] (i) administering to a patient/subject (e.g., a patient in need thereof) an effective amount of one or more unconjugated T-Cell-MPs or unconjugated duplex T-Cell-MPs of any of aspects 1-144;
   [1038] (ii) administering to a patient/subject (e.g., a patient in need thereof) an effective amount of one or more T-Cell-MP-epitope conjugates or duplex T-Cell-MP-epitope conjugates of any of aspects 145-160;
   [1039] (iii) administering to a patient/subject (e.g., a patient in need thereof) an effective amount of one or more nucleic acids encoding an unconjugated T-Cell-MP or unconjugated duplex T-Cell-MPs according to any of aspects 1-144;
   [1040] (iv) contacting a cell or tissue in vitro, in vivo, or ex vivo with one or more unconjugated T-Cell-MP or unconjugated duplex T-Cell-MPs according to any of aspects 1-144 and administering the cell, tissue, or progeny thereof to a patient/subject (e.g., a patient in need thereof);
   [1041] (v) contacting a cell or tissue in vitro, in vivo, or ex vivo with one or more T-Cell-MP-epitope conjugates or duplex T-Cell-MP-epitope conjugates of any of aspects 145-160, and administering the cell, tissue, or progeny thereof to a patient/subject (e.g., a patient in need thereof);
   [1042] Or
   [1043] (vi) contacting a cell or tissue in vitro, in vivo, or ex vivo with one or more nucleic acids encoding a T-Cell-MP or duplex T-Cell-MP of any of aspects 1-133 and administering the cell, tissue, or progeny thereof to a patient/subject (e.g., a patient in need thereof).
[1044] 162. A method of treatment or prophylaxis of a disease (e.g., a cancer or infection) or condition (e.g., an allergy) comprising
   [1045] (i) administering to a patient/subject (e.g., a patient in need thereof) an effective amount of one or more T-Cell-MP-epitope conjugates or duplex T-Cell-MP-epitope conjugates of any of aspects 145-160; or
   [1046] (ii) contacting a cell or tissue in vitro, in vivo, or ex vivo with one or more T-Cell-MP-epitope conjugates or duplex T-Cell-MP-epitope conjugates of any of aspects 145-160, and administering the cell, tissue, or progeny thereof to a patient/subject (e.g., a patient in need thereof).
[1047] 163. The method of aspect 162, wherein the one or more T-Cell-MP-epitope conjugates or duplex T-Cell-MP-epitope conjugates comprises an unconjugated T-Cell-MP-epitope conjugate or duplex T-Cell-MP-epitope conjugate of any of aspects 118-130 conjugated to an epitope (e.g., a peptide, lipopeptide, phosphopeptide, carbohydrate or glycopeptide epitope) to form a T-Cell-MP-epitope conjugate or duplex T-Cell-MP-epitope conjugate.
[1048] 164. The method of any of aspects 161-163, wherein the T-Cell-MP-epitope conjugate or duplex T-Cell-MP-epitope conjugate further comprises at least one targeting sequence (e.g., a targeting sequence specific for a cell or tissue).
[1049] 165. The method of any of aspects 131-164, wherein the administration is to a mammalian patient or subject.
[1050] 166. The method of aspect 165, wherein the patient or subject is human.
[1051] 167. The method of aspect 165, wherein the patient or subject is non-human (e.g., rodent, lagomorph, bovine, canine, feline, rodent, murine, caprine, simian, ovine, equine, lappine, porcine, etc.).
[1052] 168. The method of any of aspects 161-167, wherein the disease or condition is a cancer, and wherein, when a targeting sequence is present, it is a CTP (e.g., anti-HER2, anti-CD19, anti-mesothelin, anti-TROP2, anti-BCMA, anti-MUC-1, anti-MUC16).
[1053] 169. The method of any of aspects 161-168, wherein the epitope is a cancer epitope.
[1054] 170. The method of any of aspects 161-167, wherein the disease or condition is an infection.
[1055] 171. The method of any of aspects 161-167, wherein the disease is a viral infection.
[1056] 172. The method of any of aspects 161-167, wherein the disease is a bacterial, fungal or protozoan infection.
[1057] 173. The method of any of aspects 161-172, further comprising administering one or more therapeutic agents that enhance CD 8+ T cell functions (e.g., effector function) and/or treat the disease or condition.
[1058] 174. The method of aspect 173, wherein the therapeutic agent that enhances CD 8+ function and/or treats the disease or condition comprises an anti-TGF-β antibody such as Metelimumab (CAT192) directed against TGF-β1 and Fresolimub directed against TGF-β1 and TGF-β2, or a TGF-β trap (optionally subject to the proviso that the T-Cell-MP or duplexed T-Cell-MP does not comprise an aa sequence to which the antibodies or TGF-β trap bind such as a TGF-β1 or TGF-β2 wt. MOD or variant MOD aa sequence).
[1059] 175. The method of any of aspects 173-174, wherein the therapeutic agent that enhances CD 8+ function and/or treats the disease or condition comprises one or more antibodies directed against: B lymphocyte antigens (e.g., ibritumomab tiuxetan, obinutuzumab, ofatumumab, rituximab to CD20, brentuximab vedotin directed against CD30, and alemtuzumab to CD52); EGFR (e.g., cetuximab, panitumumab, and necitumumab); VEGF (e.g., bevacizumab); VEGFR2 (e.g., ramucirumab); HER2 (e.g., pertuzumab, trastuzumab, and ado-trastuzumab); PD-1 (e.g., nivolumab and pembrolizumab targeting a check point inhibition); RANKL (e.g., denosumab); CTLA-4 (e.g., ipilimumab targeting check point inhibition); IL-6 (e.g., siltuximab); disialoganglioside (GD2) (e.g., dinutuximab); CD38 (e.g., daratumumab); SLAMF7 (Elotuzumab); both EpCAM and CD3 (e.g., catumaxomab); or both CD19 and CD3 (blinatumomab) (optionally subject to the proviso that the T-Cell-MP or duplexed T-Cell-MP does not comprise an aa sequence to which the antibodies bind).
[1060] 176. The method of any of aspects 161-175, further comprising administering one or more additional therapeutic agents (e.g., chemotherapeutic, antibiotic, antifungal, antiviral, and/or anti-helminth agents). 177. The method of aspect 176, wherein the disease is a cancer and the method further comprises administering one or more chemotherapeutic agents.
[1061] 178. The method of aspect 177, wherein the one or more chemotherapeutic agents are selected from the group consisting of: alkylating agents, cytoskeletal disruptors (taxane), epothilones, histone deacetylase inhibitors, topoisomerase I inhibitors, topoisomerase II inhibitors, kinase inhibitors, nucleotide analogs or precursor analogs, peptide antineoplastic antibiotics (e.g. bleomycin or actinomycin), platinum-based agents, retinoids, vinca alkaloids and their derivatives.
[1062] 179. The method of aspect 176, wherein the one or more chemotherapeutic agents are selected from the group consisting of actinomycin all-trans retinoic acid, azacytidine, azathioprine, bleomycin, bortezomib, carboplatin, capecitabine, cisplatin, chlorambucil, cyclophosphamide, cytarabine, daunorubicin, docetaxel, doxifluridine, doxorubicin, epirubicin, epothilone, etoposide, fluorouracil, gemcitabine, hydroxyurea, idarubicin, imatinib, irinotecan, mechlorethamine, mercaptopurine, methotrexate, mitoxantrone, oxaliplatin, paclitaxel, pemetrexed, teniposide, tioguanine, topotecan, valrubicin, vemurafenib, vinblastine, vincristine, and vindesine.
[1063] 180. The method of any of aspects 161-167, further comprising administering one or more therapeutic agents that suppress CD 8+ T cell functions (e.g., suppress effector function), suppress immune response, and/or treat the disease or condition.
[1064] 181. The method of aspect 180, wherein the disease or condition is an autoimmune disease and the epitope is a self-antigen (self-epitope).
[1065] 182. The method of aspect 180, wherein the disease or condition is an allergy and the epitope is an allergen.
[1066] 183. The method of any of aspects 180-182, further comprising administering an NSAID (e.g., Cox-1 and/or Cox-2 inhibitors such as celecoxib, diclofenac, diflunisal, etodolac, ibuprofen, indomethacin, ketoprofen, and naproxen).
[1067] 184. The method of any of aspects 180-183, further comprising administering a corticosteroid (e.g., cortisone, dexamethasone, hydrocortisone, ethamethasoneb, fludrocortisone, methylprednisolone, prednisone, prednisolone and triamcinolone).
[1068] 185. The method of any of aspects 180-184, further comprising administering an agent that blocks one or more actions of tumor necrosis factor alpha (e.g., an anti-TNF alpha such as golimumab, infliximab, certolizumab, adalimumab or a TNF alpha decoy receptor such as etanercept) (optionally subject to the proviso that the T-Cell-MP or duplexed T-Cell-MP does not comprise tumor necrosis factor alpha wt. MOD or variant MOD and/or an aa sequence to which the agent that blocks one or more actions of TNF alpha binds).
[1069] 186. The method of any of aspects 180-185, further comprising administering one or more agents that bind to the IL-1 receptor competitively with IL-1 (e.g., anakinra) (optionally subject to the proviso that the T-Cell-MP or duplexed T-Cell-MP does not comprise an IL-1 wt. MOD or variant MOD and/or an aa sequence to which the agent binds).
[1070] 187. The method of any of aspects 180-186, further comprising administering one or more agents that bind to the IL-6 receptor and inhibits IL-6 from signaling through the receptor (e.g., tocilizumab), (optionally subject to the proviso that the T-Cell-MP or duplexed T-Cell-MP does not comprise an IL-6 wt. MOD or variant MOD and/or an aa sequence to which the agent binds).
[1071] 188. The method of any of aspects 180-187, further comprising administering one or more agents that bind to CD80 and/or CD86 receptors and inhibit T cell proliferation and/or B cell immune response (e.g., abatacept) (optionally subject to the proviso that the T-Cell-MP or duplexed T-Cell-MP does not comprise a CD80 and/or CD86 wt. MOD or variant MOD and/or an aa sequence to which the agent binds).
[1072] 189. The method of any of aspects 180-188, further comprising administering one or more agents that bind to CD20 resulting in B-Cell death (e.g., rituximab) (subject to the proviso that the T-Cell-MP or duplexed T-Cell-MP does not comprise a CD20 wt. MOD or variant MOD, and/or an aa sequence to which the agent binds).
[1073] 190. The method of any of aspects 180-189, wherein the T-Cell-MP or duplex T-Cell-MP, or the nucleic acid encoding a T-Cell-MP or duplex T-Cell-MP is administered in a composition comprising the T-Cell-MP or duplex T-Cell-MP and at least one pharmaceutically acceptable excipient.
[1074] 191. A nucleic acid sequence encoding an unconjugated T-Cell-MP of any of aspects 1 to 144 optionally comprising an additional polypeptide.
[1075] 192. The nucleic acid sequence of aspect 191, operably linked to a promoter.
[1076] 193. One or more nucleic acids comprising a nucleic acid sequence encoding an unconjugated duplex T-Cell-MP according to any of aspects 1-144, wherein at least one of the duplexed molecules optionally comprises an additional polypeptide.
[1077] 194. The one or more nucleic acids of aspect 193, wherein the nucleic acid sequence encoding the unconjugated duplex T-Cell-MP is operably linked to a promoter.
[1078] 195. A method of producing cells expressing a T-Cell-MP or duplex T-Cell-MP, the method comprising introducing one or more nucleic acids according to any of aspects 191-194 into the cells in vitro or ex vivo; selecting for cells that produce the unconjugated T-Cell-MP or unconjugated duplex T-Cell-MP; and optionally selecting for cells comprising all or part of the one or more nucleic acids either unintegrated or integrated into at least one cellular chromosome.
[1079] 196. The method of aspect 195, wherein the cells are cells of a mammalian cell line selected from the HeLa cells, CHO cells, 293 cells (HEK-293 cells), Vero cells, NIH 3T3 cells, Huh-7 cells, BHK cells, PC12, COS cells, COS-7 cells, RAT1 cells, mouse L cells, human embryonic kidney (HEK) cells, and HLHepG2 cells.
[1080] 197. One or more cells transiently or stably expressing a T-Cell-MP or duplex T-Cell-MP prepared by the method of aspect 195 or 196.
[1081] 198. The cells of aspect 197, wherein the cells express from about 20 to about 200 (e.g., 20-40, 40-80, 80-100, 100-120, 120-140, 140-160. 160-180 or 180-200) mg/liter or more of the unconjugated T-Cell-MP.
[1082] 199. The cell of aspect 198, wherein the cells express from about 20 to about 200 mg/liter or more of the unconjugated T-Cell-MP without a substantial reduction (less than a 5%, 10%, or 15% reduction) in cell viability relative to otherwise identical cells not expressing the T-Cell-MP or duplex T-Cell-MP.
[1083] 200. A method of selectively delivering one or more (e.g., two or more) wt. MOD polypeptides and/or variant MOD polypeptides to one or more cells or tissues of a patient or subject, the method comprising:
   [1084] (i) administering to a patient/subject (e.g., a patient in need thereof) an effective amount of one or more T-Cell-MPs or duplex T-Cell-MPs of any of aspects 1-160;
   [1085] wherein at least one or more T-Cell-MPs of the one or more T-Cell-MPs or duplex T-Cell-MPs comprises a targeting sequence specific to the one or more cells or tissues; and
   [1086] wherein the T-Cell-MP or duplex T-Cell-MP comprises one or more (e.g., two or more) wt. MODs and/or variant MODs.
[1087] 201. A method of selectively delivering one or more (e.g., two or more) wt. MOD polypeptides and/or variant MOD polypeptides to one or more T cells or tissues of a patient or subject, the method comprising:
   [1088] (i) administering to a patient/subject (e.g., a patient in need thereof) an effective amount of one or more T-Cell-MP-epitope conjugates or duplex T-Cell-MP-epitope conjugates of any of aspects 145-160;
   [1089] wherein at least one T cell present in the one or more T cells, or tissues is selective (e.g., specific) for the epitope conjugated to the T-Cell-MP; and
   [1090] wherein the T-Cell-MP or duplex T-Cell-MP comprises one or more wt. MODs or variant MODs.
[1091] 202. The method of aspect 200 or 201, wherein the one or more wt. MOD polypeptides and/or variant MOD polypeptides are selected independently from the group consisting of: 4-1BBL, PD-L1, IL-2, CD80, CD86, OX40L (CD252), Fas ligand (FasL), ICOS-L, ICAM, CD30L, CD40, CD83, HVEM (CD270), JAG1 (CD339), CD70, TGF-β1, TGF-β2, and TGF-β3 wt. MOD or variant MOD polypeptide sequences.
[1092] 203. The method of aspect 200 or 201, wherein the one or more wt. MOD polypeptides and/or variant MOD polypeptides are selected independently from the group consisting of: 4-1BBL, PD-L1 IL-2, CD80, CD86, and FasL wt. MOD and variant MOD polypeptide sequences of any thereof.
[1093] 204. The method of any of aspects 200 to 202, wherein the T-Cell-MP or duplex T-Cell-MP comprises at least one IL-2 wt. MOD or variant MOD polypeptide sequence, and at least one CD80, CD86, variant CD80 or variant CD86 polypeptide sequence.
[1094] 205. The method of any of aspects 200 to 202, wherein the T-Cell-MP or duplex T-Cell-MP comprises at least one IL-2 wt. MOD or variant MOD polypeptide sequence, or at least one pair of IL-2 wt. MOD or variant MOD polypeptide sequences in tandem.
[1095] 206. The method of any of aspects 200 to 202, wherein the T-Cell-MP or duplex T-Cell-MP comprises at least one CD80 and/or CD86 wt. MOD or variant MOD polypeptide sequence.
[1096] 207. The method of any of aspects 200 to 202, wherein the T-Cell-MP or duplex T-Cell-MP comprises at least one PD-L1 wt. MOD or variant MOD polypeptide sequence.
[1097] 208. The method of any of aspects 200 to 202, wherein the T-Cell-MP or duplex T-Cell-MP comprises at least one FasL wt. MOD or variant MOD polypeptide sequence.

### X. Examples

### Example 1

[1098] Nucleic acids were prepared encoding a series of constructs comprising a HLA-A*02:01(HLA-A02) class I heavy chain polypeptide sequence, a human β2M polypeptide sequence, and an IgG scaffold sequence, as core elements of split chain or single chain constructs shown as duplexes in FIG. 12 at A, B and C.

[1099] Each of the split chain constructs (structures A or B) has a first polypeptide sequence that comprises from the N-terminus to the C-terminus tandem human IL-2 polypeptide sequences (2×hIL2) with F42A,H16A substitutions, HLA-A*02:01 (A02) α1, α2, and α3 domains, and a human IgG1 scaffold with L234A and L235A substitutions. The 1694 first polypeptide appearing in most of the split chain constructs comprises an A236C,Y84C and A139C substitutions 2×hIL2 (F42A, H16A)-(G₄S)₄-HLA-A02 (A236C, Y84C, A139C)-AAAGG-IgG1 (L234A, L235A):

(SEQ ID NO: 493)
APTSSSTKKTQLQLEALLLDLQMILNGINNYKNPKLTRMLTAKFYMPKKAT
ELKHLQCLEEELKPLEEVLNLAQSKNFHLRPRDLISNINVIVLELKGSETT
FMCEYADETATIVEFLNRWITFCQSIISTLT [symbol]
APTSSSTKKTQLQLEALLLDLQMILNGINNYKNPKLTRMLTAKFYMPKKAT
ELKHLQCLEEELKPLEEVLNLAQSKNFHLRPRDLISNINVIVLELKGSETT
FMCEYADETATIVEFLNRWITFCQSIISTLT [symbol]
GSHSMRYFFTSVSRPGRGEPRFIAVGYVDDTQFVRFDSDAASQRMEPRAPW
IEQEGPEYWDGETRKVKAHSQTHRVDLGTLRG [symbol] YNQSEAGSHTVQRMYGCD
VGSDWRFLRGYHQYAYDGKDYIALKEDLRSWTAADM [symbol] AQTTKHKWEAAHVA
EQLRAYLEGTCVEWLRRYLENGKETLQRTDAPKTHMTHHAVSDHEATLRCW
ALSFYPAEITLTWQRDGEDQTQDTELVETRP [symbol] GDGTFQKWAAVVVPSGQEQ
RYTCHVQHEGLPKPLTLRWE [symbol] DKTHTCPPCPAPEAAGGPSVFLFPPK
PKDTLMISRTPEVTCVVVDVSHEDPEVKFNWYVDGVEVHNAKTKPREEQYN
STYRVVSVLTVLHQDWLNGKEYKCKVSNKALPAPIEKTISKAKGQPREPQV
YTLPPSREEMTKNQVSLTCLVKGFYPSDIAVEWESNGQPENNYKTTPPVLD
SDGSFFLYSKLTVDKSRWQQGNVFSCSVMHEALHNHYTQKSLSLSPGK
(linker sequences are indicated in bold and
italics).

[1100] The 4008 polypeptide appearing in two split chain constructs parallels the 1694 construct, but comprises A236C, Y85C, and D137C substitutions in the HLA-A02 sequence—2×hIL2 (F42A, H16A)-(G4S)₄-HLA-A02 (A236C, Y85C, D137C)-AAAGG-IgG1 (L234A, L235A):

(SEQ ID NO: 494)
APTSSSTKKTQLQLEALLLDLQMILNGINNYKNPKLTRMLTAKFYMPKKAT
ELKHLQCLEEELKPLEEVLNLAQSKNFHLRPRDLISNINVIVLELKGSETT
FMCEYADETATIVEFLNRWITFCQSIISTLT [symbol]
APTSSSTKKTQLQLEALLLDLQMILNGINNYKNPKLTRMLTAKFYMPKKAT
ELKHLQCLEEELKPLEEVLNLAQSKNFHLRPRDLISNINVIVLELKGSETT
FMCEYADETATIVEFLNRWITFCQSIISTLT [symbol]
GSHSMRYFFTSVSRPGRGEPRFIAVGYVDDTQFVRFDSDAASQRMEPRAPW
IEQEGPEYWDGETRKVKAHSQTHRVDLGTLRGYCNQSEAGSHTVQRMYGCD
VGSDWRFLRGYHQYAYDGKDYIALKEDLRSWTAA [symbol] MAAQTTKHKWEAAHVA
EQLRAYLEGTCVEWLRRYLENGKETLQRTDAPKTHMTHHAVSDHEATLRCW
ALSFYPAEITLTWQRDGEDQTQDTELVETRPCGDGTFQKWAAVVVPSGQEQ
RYTCHVQHEGLPKPLTLRWE [symbol] DKTHTCPPCPAPEAAGGPSVFLFPPK
PKDTLMISRTPEVTCVVVDVSHEDPEVKFNWYVDGVEVHNAKTKPREEQYN
STYRVVSVLTVLHQDWLNGKEYKCKVSNKALPAPIEKTISKAKGQPREPQV
YTLPPSREEMTKNQVSLTCLVKGFYPSDIAVEWESNGQPENNYKTTPPVLD
SDGSFFLYSKLTVDKSRWQQGNVFSCSVMHEALHNHYTQKSLSLSPGK.

[1101] Each of the split chain constructs (structures A and B) in FIG. 12 comprises a second polypeptide comprising a β2M polypeptide sequence having R12C and E44C substitutions: IQRTPKIQVYSCHPAENGKSNFLNCYVSGFHPSDIEVDLLKNGCRIEKVEHSDLSFSKDWSFYLLY YTEFTPTEKDEYACRVNHVTLSQPKIVKWDRDM (SEQ ID NO:495); to which ether the indicated linker, or CMV peptide epitope NLVPMVATV and linker, is added at their N-termini as indicated in the table provided below.

[1102] The unconjugated T-Cell-MP conjugates listed in FIG. 12 each comprise as a single polypeptide chain from N-terminus to C-terminus IL-2, β2M, HLA-A*02:01 (A02) α1, α2, and α3 domains, and human IgG1 polypeptide sequences. The aa sequence of the 3861 construct is provided below, and the remainder of the single chain T-Cell-MP constructs may be considered variations of the 3861 construct, which has tandem 2×IL-2 sequences with F42A and H16A substitutions-a (G₄S)₄ linker-β2M (E44C)-a (G₄S)₃ linker-HLA-A02 with Y84C, A139C— a AAAGG linker- and an IgG1 with L234A and L235A substitutions: APTSSSTKKTQLQLEALLLDLQMILNGINNYKNPKLTRMLTAKFYMPKKATEL KHLQCLEEELKPLEEVLNLAQSKNFHLRPRDLISNINVIVLELKGSETTFMCEYADETATIVEFLN RWITFCQSIISTLT [symbol] APTSSSTKKTQLQLEALLLDLQMILNGINNYK NPKLTRMLTAKFYMPKKATELKHLQCLEEELKPLEEVLNLAQSKNFHLRPRDLISNINVIVLELK GSETTFMCEYADETATIVEFLNRWITFCQSIISTLT [symbol] IQRTPKIQVY SRHPAENGKSNFLNCYVSGFHPSDIEVDLLKNGCRIEKVEHSDLSFSKDWSFYLLYYTEFTPTEK DEYACRVNHVTLSQPKIVKWDRDM [symbol] GSHSMRYFFTSVSRPGRGEPRFIA VGYVDDTQFVRFDSDAASQRMEPRAPWIEQEGPEYWDGETRKVKAHSQTHRVDLGTLRGCYN QSEAGSHTVQRMYGCDVGSDWRFLRGYHQYAYDGKDYIALKEDLRSWTAADMCAQTTKHKW EAAHVAEQLRAYLEGTCVEWLRRYLENGKETLQRTDAPKTHMTHHAVSDHEATLRCWALSFY PAEITLTWQRDGEDQTQDTELVETRPAGDGTFQKWAAVVVPSGQEQRYTCHVQHEGLPKPLTL RWE [symbol] DKTHTCPPCPAPEAAGGPSVFLFPPKPKDTLMISRTPEVTCVVVDVSHEDPEVKFN WYVDGVEVHNAKTKPREEQYNSTYRVVSVLTVLHQDWLNGKEYKCKVSNKALPAPIEKTISKA KGQPREPQVYTLPPSREEMTKNQVSLTCLVKGFYPSDIAVEWESNGQPENNYKTTPPVLDSDGSF FLYSKLTVDKSRWQQGNVFSCSVMHEALHNHYTQKSLSLSPG (SEQ ID NO:496).

[1103] Where tandem IL-2 sequences are present in the constructs of this example, they are separated by a (G₄S)₄ linker. Each of the sequences other than 3861 has variations in the linkers present between the IL-2 and β2M, and/or β2M and HLA-A02 sequences (the L3 linker) as indicated. Additionally, construct 3984 has only a single IL-2 sequence, and each of 3999-4002 have an additional aa substitution in the HLA-A02 polypeptide sequence as indicated in the table that follows.

| | | |
|---|---|---|
| | Form in | |
| Construct | FIG. 12 | Construct Content and Organization |

Split Chain Construct).

| | | | |
|---|---|---|---|
| 1694 | 2686 | B | β2M (R12C, E44C) |
| | 839 | A | CMV-GGGASGGGGSGGGGS-β2M (R12C) |
| | 3993 | B | GM-(G₄S)₃-β2M (R12C, E44C) |
| | 3994 | B | GMGGS-(G₄S)₂₋β2M (R12C, E44C) |
| | 3995 | B | GMS-(G₄S)2-β2M (R12C, E44C) |
| | 3996 | B | GMGGGS-(G₄S)-β2M (R12C, E44C) |
| | 3997 | B | GMGS-(G₄S)-β2M (R12C, E44C) |
| | 3998 | B | GM-(G₄S)-β2M (R12C, E44C) |
| | 4002 | A | CMV-(G₃AS)-(G4S)₂-β2M (R12C, E44C) |
| | 4003 | A | CMV-(G₃AS)-(G₄S)-FC1-(G₄S)-β2M (R12C, E44C) |
| 4008 | 839 | A | CMV-GGGASGGGGSGGGGS-β2M (R12C) |
| | 2686 | B | β2M (R12C, E44C) |

Unconjugated T-Cell-MP (Single Chain Construct)

| | | |
|---|---|---|
| 3984 | C | 1xhIL2(F42A, H16A)-(G₄S)₄-β2M (E44C)-(G₄S)₃-HLA-A02(Y84C, |
| | | A139C)-AAAGG-IgG1(L234A, L235A) |
| 3985 | C | hIL2 (F42A, H16A)-(G₄S)₄-hIL2 (F42A, H16A)-(G₄S)-GLGGS-(G₄S)₂- |
| | | β2M (E44C)-(G₄S)₃-HLA-A02(Y84C, A139C)-AAAGG-IgG1(L234A, |
| | | L235A) |
| 3986 | C | hIL2 (F42A, H16A)-(G₄S)₄-hIL2 (F42A, H16A)-(G₄S)₂-GLGGS-(G₄S)- |
| | | β2M (E44C)-(G₄S)₃-HLA-A02(Y84C,A139C)-AAAGG-IgG1(L234A, |
| | | L235A) |
| 3987 | C | hIL2 (F42A, H16A)-(G₄S)₄-hIL2 (F42A, H16A)-(G₄S)₃-GLGGS-β2M |
| | | (E44C)-(G₄S)₃-HLA-A02(Y84C, A139C)-AAAGG-IgG1(L234A, L235A) |
| 3988 | C | hIL2 (F42A, H16A)-(G₄S)₄-hIL2 (F42A, H16A)-(G₄S)-GMGGSGGGGS- |
| | | (G₄S)-β2M (E44C)-(G₄S)₃-HLA-A02(Y84C, A139C)-AAAGG- |
| | | IgG1(L234A, L235A) |
| 3989 | C | hIL2 (F42A, H16A)-(G₄S)₄-hIL2 (F42A, H16A)-(G₄S)-GGGMSGGGGS- |
| | | (G₄S)-β2M (E44C)-(G₄S)₃-HLA-A02(Y84C, A139C)-AAAGG- |
| | | IgG1(L234A, L235A) |
| 3990 | C | hIL2 (F42A, H16A)-(G₄S)₄-hIL2 (F42A, H16A)-(G4S)-GGGGSMGGGS- |
| | | (G4S)-β2M (E44C)-(G4S)3-HLA-A02(Y84C, A139C)-AAAGG- |
| | | IgG1(L234A, L235A) |
| 3991 | C | hIL2 (F42A, H16A)-(G₄S)₄-hIL2 (F42A, H16A)-(G₄S)-GGGGSGMGGS- |
| | | (G₄S)-β2M (E44C)-(G₄S)₃-HLA-A02(Y84C, A139C)-AAAGG- |
| | | IgG1(L234A, L235A) |
| 3992 | C | hIL2 (F42A, H16A)-(G₄S)₄-hIL2 (F42A, H16A)-(G₄S)-GGGGSGGGGM- |
| | | (G₄S)-β2M (E44C)-(G₄S)₃-HLA-A02(Y84C, A139C)-AAAGG- |
| | | IgG1(L234A, L235A) |
| 3861 | C | hIL2 (F42A, H16A)-(G₄S)₄-hIL2 (F42A, H16A)-(G₄S)₄-β2M (E44C)- |
| | | (G₄S)₃-HLA-A02(Y84C, A139C)-AAAGG-IgG1(L234A, L235A) |
| 4004 | C | hIL2 (F42A, H16A)-(G₄S)₄-hIL2 (F42A, H16A)-(G₄S)₅-β2M (E44C)- |
| | | (G₄S)₃-HLA-A02(Y84C, A139C)-AAAGG-IgG1(L234A, L235A) |
| 4005 | C | hIL2 (F42A, H16A)-(G₄S)₄-hIL2 (F42A, H16A)-(G₄S)₆-β2M (E44C)- |
| | | (G₄S)₃-HLA-A02(Y84C, A139C)-AAAGG-IgG1(L234A, L235A) |
| 4006 | C | hIL2 (F42A, H16A)-(G₄S)₄-hIL2 (F42A, H16A)-(G₄S)₄-β2M (E44C)- |
| | | (G₄S)₂-HLA-A02(Y84C, A139C)-AAAGG-IgG1(L234A, L235A) |
| 4007 | C | hIL2 (F42A, H16A)-(G₄S)₄-hIL2 (F42A, H16A)-(G₄S)₄-β2M (E44C)- |
| | | (G₄S)-HLA-A02(Y84C, A139C)-AAAGG-IgG1(L234A, L235A) |
| 3999 | C | hIL2 (F42A, H16A)-(G₄S)₄-hIL2 (F42A, H16A)-(G₄S)₄-β2M (E44C)- |
| | | (G₄S)₃-HLA-A02(Y84C, A139C, T143L)-AAAGG-IgG1(L234A, L235A) |
| 4000 | C | hIL2 (F42A, H16A)-(G₄S)₄-hIL2 (F42A, H16A)-(G₄S)₄-β2M (E44C)- |
| | | (G₄S)₃-HLA-A02(Y84C, A139C, T143M)-AAAGG-IgG1(L234A, |
| | | L235A) |
| 4001 | C | hIL2 (F42A, H16A)-(G₄S)₄-hIL2 (F42A, H16A)-(G₄S)₄-β2M (E44C)- |
| | | (G₄S)₃-HLA-A02(L81M, Y84C, A139C)-AAAGG-IgG1(L234A,L235A) |

[1104] The nucleic acids encoding the protein constructs were transfected into and expressed by CHO cells as soluble protein in the culture media. The level of protein expressed in the culture media after 7 days was determined by BLI assay using protein A to capture the expressed protein (FIG. 12 at D). The fraction of protein appearing in unaggregated duplex form is assessed by isolating the protein from the culture media using magnetic protein A beads. After washing, the bound protein is eluted from the beads by reducing the pH, and then subject to analytical size exclusion chromatography using UV detection on an AGILENT® chromatography system. The fraction of unaggregated protein reported in FIG. 12 at E is based on the area of the peak corresponding to the molecular weight of the duplex relative to the total area of the chromatographed protein.

[1105] The results indicate that unconjugated single chain T-Cell-MP constructs appear to be expressed more uniformly at higher levels than their unconjugated split chain construct counterparts.

### Example 2

[1106] The effect of time in culture, cell culture density, and culture temperature on unconjugated T-Cell-MPs was examined by transiently expressing the construct 3861 (see Example 1) in CHO cells at 28 and 32° C. Transfection was accomplished with expiCHO® transfection kits (Gibco™/ThermoFisher Scientific, Skokie, Ill.) using a recombinant pTT5 vector into which the cassette encoding the polypeptide was cloned. The transfected cells were diluted to 2, 4 or 6 million cells per milliliter and T-Cell-MP 3861 expression levels and the fraction of unaggregated protein in duplex form determined at days 2, 4, 7, and/or 9 as indicated by removing a portion of the culture. Analyses were conducted as in Example 1 and are shown in FIG. 13 (at A and B) with the number of cells and culture temperature shown below each histogram set (e.g., six million cells at 32° C. denoted as 6M/32C). Also shown in FIG. 13 are size exclusion chromatograms (C and D) of the unconjugated 3861 T-Cell-MP harvested from a culture using protein A and after further purification by size exclusion chromatography (upper and lower chromatograms respectively). Coomassie blue stained SDS PAGE analysis (at E) confirms the purity and homogeneity of the purified material, samples of which were applied to the gel in reduced (R) and non-reduced form (NR).

### Example 3

[1107] The specific interaction of T-Cell-MP epitope conjugates and control constructs with epitope specific T cells was assessed by incubating the molecules with T cells responsive to either the CMV peptide NLVPMVATV (black bars) or the Melan-A and Mucin Related Peptide (MART-1) ELAGIGILTV (white bars) in the histogram of Elispot data provided FIG. 14A. Control samples of the unconjugated 3861 T-Cell-MP duplex (see FIG. 12 at C for the general structure) group 1, and an unconjugated split chain construct comprising polypeptides 1694 and 2686 (duplexed as in FIG. 12 at B) group 2 were run in parallel with test samples. T-Cell-MP and split chain constructs conjugated to the E44C position of β2M through a (G₄S)₃ linker by a maleimide group are shown in groups 3 and 4. The effect of control construct split chain fusion proteins (FIG. 12 structure A) having a CMV or MART-1 polypeptide as part of the fusion protein are shown in groups 5 and 6 respectively. Control stimulation by CMV and MART-1 peptides is shown in groups 7 and 8 respectively. The histogram indicates the number of spots due to captured interferon gamma indicating activation of the T cells by the treatments.

[1108] The SDS-PAGE gel shown in FIG. 14 B provides an analysis of reducing and non-reducing samples of the epitope conjugates and fusion proteins, indicating their purity and homogeneity.

### Example 4

[1109] Ficoll-Paque® purified samples of leukocytes from CMV responsive donors (Donors 8, 10, 38, and 39) and MART-1 responsive donors (Donors 17 and 18) were prepared and used to demonstrate the ability of T-Cell-MP-epitope conjugates to expand T cells specific to CMV or MART-1 specific epitopes. MART-1 responsive Donor 18 also displays some responsiveness to the CMV peptide. Positive and negative control treatments included: treatment with split chain constructs conjugated to CMV and MART-1 peptides; treatment with the CMV or MART-1 peptides in culture media; and media only control treatment. For the experiments, leukocytes were suspended at 2.5×10⁶ cells per ml in ImmunoCult™ media (Stemcell Technologies, Vancouver, British Columbia) containing the indicated amounts of the control or T-Cell-MP-epitope conjugate or control treatments. After 10 days in culture the number of cells responsive to CMV or MART-1 were assessed by Flow cytometry using CMV or MART-1 tetramers purchased from MBL International Corp. The results indicate that both the T-Cell-MP and split chain constructs conjugated to the CMV peptide, and to a lesser degree CMV peptide, stimulate expansion of CMV specific T cells from CMV responsive donors in a concentration dependent manner T-Cell-MP and split chain constructs conjugated to the MART-1 peptide, and to a lesser degree the MART-1 peptide stimulate expansion of MART-1 specific T cells from MART-1 responsive donors in a concentration dependent manner. In each instance, CMV peptide conjugates selectively stimulated T cells from CMV responsive donors but not MART-1 responsive donors and vice versa. Free peptide in the absence of IL-2 failed to produce an effect the was equal to the effect observed with the T-Cell-MP epitope conjugates. Results are provided in FIG. 15.

[1110] The T-Cell-MP-epitope conjugate employed for the assays was a duplex of the 3186 polypeptide (see Example 1 and FIG. 12 structure C for the general form of the unconjugated duplex) conjugated at a cysteine (E44C) in the β2M polypeptide sequence to a either a CMV (NLVPMVATV) or MART-1 (ELAGIGILTV) (SEQ ID NO:533) peptide via a (G₄S)₃ linker bearing a maleimide group (e.g., for the CMV peptide NLVPMVATV-(G₄S)₃-lysine-epsilon amino-maleimide). The split chain epitope conjugate was a duplex of two split chain constructs each comprising a1694 and 2686 polypeptide (see Example 1 and FIG. 12 structure B for the general form of the unconjugated duplex), which was conjugated at a cysteine (E44C) in the β2M polypeptide sequence to a either a CMV (NLVPMVATV) or MART-1 (ELAGIGILTV) peptide via a (G₄S)₃ linker bearing a maleimide group. After reduction to remove any capping from the cysteine conjugation sites, the conjugation was conducted as described in for maleimide coupling reactions using at least two additions of the peptide bearing a maleimide group.

[1111] In an additional test, the effect of a construct bearing a (G₄S)₇ L3 linker (the linker between the β2M and HLA-A02 sequences), but otherwise identical to 3861, was compared with the 3861 polypeptide duplex (i.e., construct 4125 2×IL2(F42A, H16A)-(G₄S)₇-β2M (E44C)-(G₄S)₃-HLA-A02(Y84C, A139C)-AAAGG-IgG1(L234A, L235A)). Duplexes of both the 3861 and 4125 constructs were conjugated to a CMV or MART-1 peptide by a maleimide terminated (G₄S)₃ linker and tested side-by-side for the ability to expand T cells in an epitope specific manner. The assays were conducted as described above for the 3861 epitope conjugates, except only a media alone control was conducted. The results, shown in FIG. 16, indicate that extending the linker length did not substantively alter the expansion of T cells seen with the 3861 epitope conjugates.

### Example 5

[1112] In order to examine the effect of L3 linker length on the level of cell expression and the quality (fraction unaggregated) of T-Cell-MP proteins a series of nucleic acids encoding constructs 4125 through 4128 that are related to construct 3861 but with L3 linkers of increasing length were prepared and inserted into an expression vector (pTT5). A second set of constructs (4129-4133) bearing an additional R12C substitution in the β2M polypeptide (R12C, E44C) and an A236C substitution in the HLA-A02 peptide that can form an interchain disulfide bond was also prepared. The vectors were transfected into CHO cells with expiCHO® transfection kits and both the amount of protein expressed in the culture media and the fraction of unaggregated protein after purification using magnetic beads was assessed at days 4, 6, 8, and/or 11 as indicated. The specific constructs included those recited in the following table.

| Con- | Form in | L3 linker | |
|---|---|---|---|
| struct | FIG. 12 | (G₄S)n | Construct Content and Organization |
| 3861 | C | n = 3 | hIL2 (F42A, H16A)-(G₄S)₄-hIL2 (F42A, H16A)-(G₄S)₄-β2M |
| | | | (E44C)-(G₄S)₃-HLA-A02(Y84C, A139C)-AAAGG-IgG1(L234A, |
| | | | L235A) |
| 4128 | C | n = 4 | hIL2 (F42A, H16A)-(G₄S)₄-hIL2 (F42A, H16A)-(G₄S)₄-β2M |
| | | | (E44C)-(G₄S)₄-HLA-A02(Y84C,A139C)-AAAGG-IgG1(L234A, |
| | | | L235A) |
| 4127 | C | n = 5 | hIL2 (F42A, H16A)-(G₄S)₄-hIL2 (F42A, H16A)-(G₄S)₄-β2M |
| | | | (E44C)-(G₄S)₅-HLA-A02(Y84C, A139C)-AAAGG-IgG1(L234A, |
| | | | L235A) |
| 4126 | C | n = 6 | hIL2 (F42A, H16A)-(G₄S)₄-hIL2 (F42A, H16A)-(G₄S)₄-β2M |
| | | | (E44C)-(G₄S)₆-HLA-A02(Y84C, A139C)-AAAGG-IgG1(L234A, |
| | | | L235A) |
| 4125 | C | n = 7 | hIL2 (F42A, H16A)-(G₄S)₄-hIL2 (F42A, H16A)-(G₄S)₄-β2M |
| | | | (E44C)-(G₄S)₇-HLA-A02(Y84C, A139C)-AAAGG-IgG1(L234A, |
| | | | L235A) |
| 4129 | C | n = 7 | hIL2 (F42A, H16A)-(G₄S)₄-hIL2 (F42A, H16A)-(G₄S)₄-β2M (R12C, |
| | | | E44C)-(G₄S)₇-HLA-A02(Y84C, A139C, A236C)-AAAGG- |
| | | | IgG1(L234A, L235A) |
| 4130 | C | n = 6 | hIL2 (F42A, H16A)-(G₄S)₄-hIL2 (F42A, H16A)-(G₄S)₄-β2M (R12C, |
| | | | E44C)-(G₄S)₆-HLA-A02(Y84C, A139C, A236C)-AAAGG- |
| | | | IgG1(L234A, L235A) |
| 4131 | C | n = 5 | hIL2 (F42A, H16A)-(G₄S)₄-hIL2 (F42A, H16A)-(G₄S)₄-β2M (R12C, |
| | | | E44C)-(G₄S)₅-HLA-A02(Y84C, A139C, A236C)-AAAGG- |
| | | | IgG1(L234A, L235A) |
| 4132 | C | n = 4 | hIL2 (F42A, H16A)-(G₄S)₄-hIL2 (F42A, H16A)-(G₄S)₄-β2M (R12C, |
| | | | E44C)-(G₄S)₄-HLA-A02(Y84C, A139C, A236C)-AAAGG- |
| | | | IgG1(L234A, L235A) |
| 4133 | C | n = 3 | hIL2 (F42A, H16A)-(G₄S)₄-hIL2 (F42A, H16A)-(G₄S)₄-β2M (R12C, |
| | | | E44C)-(G₄S)₃-HLA-A02(Y84C, A139C, A236C)-AAAGG- |
| | | | IgG1(L234A, L235A) |

[1113] The amount of the expressed unconjugated T-Cell-MP constructs were determined by BLI assay using protein A for capture on a BioForte instrument using the methods described in Example 1. Results are provided in FIG. 17 histogram A.

[1114] The fraction of unconjugated T-Cell-MP that is unaggregated (present in duplex form) after purification on magnetic protein A beads was determined by size exclusion chromatography. The fraction was determined using the area of the chromatographic peak corresponding to the molecular weight of the duplex relative to the area under the chromatogram as described in Example 1. Results are shown in FIG. 17 histogram B.

[1115] Additional optimization indicates that higher yields are possible. Construct 4125 has been observed to reach 200 mg/ml and construct 4127 has been observed to reach 170 mg/ml in CHO culture cell media prior to isolation.

The application's sequence listing, which the Patent Office published only in electronic form, follows.

SEQUENCE LISTING (572 sequences)

SEQ ID NO: 1 - protein, 352 aa, Homo sapiens
ASPTSPVFPLSLCSTQPDGNVVIACLVQGFFPQEPLSVTWSESGQGVTARNFPPSQDASGDLYTTSSQLTLPATQCLAGKSVTCHVKHYTNPSQDVTVPCPVPSTPPTPSPSTPPTPSPSCCHPRLSLHRPALEDLLLGSEANLTCTLTGLRDASGVTFTWTPSSGKSAVQGPPERDLCGCYSVSSVLPGCAEPWNHGKTFTCTAAYPESKTPLTATLSKSGNTFRPEVHLLPPPSEELALNELVTLTCLARGFSPKDVLVRWLQGSQELPREKYLTWASRQEPSQGTTTFAVTSILRVAAEDWKKGDTFSCMVGHEALPLAFTQKTIDRLAGKPTHVNVSVVMAEVDGTCY

SEQ ID NO: 2 - protein, 383 aa, Homo sapiens
PTKAPDVFPIISGCRHPKDNSPVVLACLITGYHPTSVTVTWYMGTQSQPQRTFPEIQRRDSYYMTSSQLSTPLQQWRQGEYKCVVQHTASKSKKEIFRWPESPKAQASSVPTAQPQAEGSLAKATTAPATTRNTGRGGEEKKKEKEKEEQEERETKTPECPSHTQPLGVYLLTPAVQDLWLRDKATFTCFVVGSDLKDAHLTWEVAGKVPTGGVEEGLLERHSNGSQSQHSRLTLPRSLWNAGTSVTCTLNHPSLPPQRLMALREPAAQAPVKLSLNLLASSDPPEAASWLLCEVSGFSPPNILLMWLEDQREVNTSGFAPARPPPQPRSTTFWAWSVLRVPAPPSPQPATYTCVVSHEDSRTLLNASRSLEVSYVTDHGPMK

SEQ ID NO: 3 - protein, 222 aa, Homo sapiens
ADPCDSNPRGVSAYLSRPSPFDLFIRKSPTITCLVVDLAPSKGTVNLTWSRASGKPVNHSTRKEEKQRNGTLTVTSTLPVGTRDWIEGETYQCRVTHPHLPRALMRSTTKTSGPRAAPEVYAFATPEWPGSRDKRTLACLIQNFMPEDISVQWLHNEVQLPDARHSTTQPRKTKGSGFFVFSRLEVTRAEWEQKDEFICRAVHEAASPSQTVQRAVSVNPGK

SEQ ID NO: 4 - protein, 227 aa, Homo sapiens
DKTHTCPPCPAPELLGGPSVFLFPPKPKDTLMISRTPEVTCVVVDVSHEDPEVKFNWYVDGVEVHNAKTKPREEQYNSTYRVVSVLTVLHQDWLNGKEYKCKVSNKALPAPIEKTISKAKGQPREPQVYTLPPSREEMTKNQVSLTCLVKGFYPSDIAVEWESNGQPENNYKTTPPVLDSDGSFFLYSKLTVDKSRWQQGNVFSCSVMHEALHNHYTQKSLSLSPGK

SEQ ID NO: 5 - protein, 227 aa, Homo sapiens
DKTHTCPPCPAPELLGGPSVFLFPPKPKDTLMISRTPEVTCVVVDVSHEDPEVKFNWYVDGVEVHNAKTKPREEQYNSTYRVVSVLTVLHQDWLNGKEYKCKVSNKALPAPIEKTISKAKGQPREPQVYTLPPSRDELTKNQVSLTCLVKGFYPSDIAVEWESNGQPENNYKTTPPVLDSDGSFFLYSKLTVDKSRWQQGNVFSCSVMHEALHNHYTQKSLSLSPGK

SEQ ID NO: 6 - protein, 227 aa, Homo sapiens
DKTHTCPPCPAPEFEGGPSVFLFPPKPKDTLMISRTPEVTCVVVDVSHEDPEVKFNWYVDGVEVHNAKTKPREEQYNSTYRVVSVLTVLHQDWLNGKEYKCKVSNKALPASIEKTISKAKGQPREPQVYTLPPSREEMTKNQVSLTCLVKGFYPSDIAVEWESNGQPENNYKTTPPVLDSDGSFFLYSKLTVDKSRWQQGNVFSCSVMHEALHNHYTQKSLSLSPGK

SEQ ID NO: 7 - protein, 227 aa, Homo sapiens
DKTHTCPPCPAPELLGGPSVFLFPPKPKDTLMISRTPEVTCVVVDVSHEDPEVKFNWYVDGVEVHNAKTKPREEQYASTYRVVSVLTVLHQDWLNGKEYKCKVSNKALPAPIEKTISKAKGQPREPQVYTLPPSREEMTKNQVSLTCLVKGFYPSDIAVEWESNGQPENNYKTTPPVLDSDGSFFLYSKLTVDKSRWQQGNVFSCSVMHEALHNHYTQKSLSLSPGK

SEQ ID NO: 8 - protein, 227 aa, Homo sapiens
DKTHTCPPCPAPEAAGGPSVFLFPPKPKDTLMISRTPEVTCVVVDVSHEDPEVKFNWYVDGVEVHNAKTKPREEQYNSTYRVVSVLTVLHQDWLNGKEYKCKVSNKALPAPIEKTISKAKGQPREPQVYTLPPSREEMTKNQVSLTCLVKGFYPSDIAVEWESNGQPENNYKTTPPVLDSDGSFFLYSKLTVDKSRWQQGNVFSCSVMHEALHNHYTQKSLSLSPGK

SEQ ID NO: 9 - protein, 325 aa, Homo sapiens
STKGPSVFPLAPCSRSTSESTAALGCLVKDYFPEPVTVSWNSGALTSGVHTFPAVLQSSGLYSLSSVVTVPSSNFGTQTYTCNVDHKPSNTKVDKTVERKCCVECPPCPAPPVAGPSVFLFPPKPKDTLMISRTPEVTCVVVDVSHEDPEVQFNWYVDGVEVHNAKTKPREEQFNSTFRVVSVLTVVHQDWLNGKEYKCKVSNKGLPAPIEKTISKTKGQPREPQVYTLPPSREEMTKNQVSLTCLVKGFYPSDIAVEWESNGQPENNYKTTPPMLDSDGSFFLYSKLTVDKSRWQQGNVFSCSVMHEALHNHYTQKSLSLSPGK

SEQ ID NO: 10 - protein, 246 aa, Homo sapiens
HKPSNTKVDKRVELKTPLGDTTHTCPPCPAPELLGGPSVFLFPPKPKDTLMISRTPEVTCVVVDVSHEDPEVKFNWYVDGVEVHNAKTKPREEQYNSTYRVVSVLTVLHQDWLNGKEYKCKVSNKALPAPIEKTISKAKGQPREPQVYTLPPSRDELTKNQVSLTCLVKGFYPSDIAVEWESNGQPENNYKTTPPVLDSDGSFFLYSKLTVDKSRWQQGNVFSCSVMHEALHNHYTQKSLSLSPGK

SEQ ID NO: 11 - protein, 327 aa, Homo sapiens
ASTKGPSVFPLAPCSRSTSESTAALGCLVKDYFPEPVTVSWNSGALTSGVHTFPAVLQSSGLYSLSSVVTVPSSSLGTKTYTCNVDHKPSNTKVDKRVESKYGPPCPSCPAPEFLGGPSVFLFPPKPKDTLMISRTPEVTCVVVDVSQEDPEVQFNWYVDGVEVHNAKTKPREEQFNSTYRVVSVLTVLHQDWLNGKEYKCKVSNKGLPSSIEKTISKAKGQPREPQVYTLPPSQEEMTKNQVSLTCLVKGFYPSDIAVEWESNGQPENNYKTTPPVLDSDGSFFLYSRLTVDKSRWQEGNVFSCSVMHEALHNHYTQKSLSLSLGK

SEQ ID NO: 12 - protein, 223 aa, Homo sapiens
PPCPSCPAPEFLGGPSVFLFPPKPKDTLMISRTPEVTCVVVDVSQEDPEVQFNWYVDGVEVHNAKTKPREEQFNSTYRVVSVLTVLHQDWLNGKEYKCKVSNKGLPSSIEKTISKAKGQPREPQVYTLPPSQEEMTKNQVSLTCLVKGFYPSDIAVEWESNGQPENNYKTTPPVLDSDGSFFLYSRLTVDKSRWQEGNVFSCSVMHEALHNHYTQKSLSLSPG

SEQ ID NO: 13 - protein, 453 aa, Homo sapiens
GSASAPTLFPLVSCENSPSDTSSVAVGCLAQDFLPDSITFSWKYKNNSDISSTRGFPSVLRGGKYAATSQVLLPSKDVMQGTDEHVVCKVQHPNGNKEKNVPLPVIAELPPKVSVFVPPRDGFFGNPRKSKLICQATGFSPRQIQVSWLREGKQVGSGVTTDQVQAEAKESGPTTYKVTSTLTIKESDWLGQSMFTCRVDHRGLTFQQNASSMCVPDQDTAIRVFAIPPSFASIFLTKSTKLTCLVTDLTTYDSVTISWTRQNGEAVKTHTNISESHPNATFSAVGEASICEDDWNSGERFTCTVTHTDLPSPLKQTISRPKGVALHRPDVYLLPPAREQLNLRESATITCLVTGFSPADVFVQWMQRGQPLSPEKYVTSAPMPEPQAPGRYFAHSILTVSEEEWNTGETYTCVVAHEALPNRVTERTVDKSTGKPTLYNVSLVMSDTAGTCY

SEQ ID NO: 14 - protein, 159 aa, Homo sapiens
MKNHLLFWGVLAVFIKAVHVKAQEDERIVLVDNKCKCARITSRIIRSSEDPNEDIVERNIRIIVPLNNRENISDPTSPLRTRFVYHLSDLCKKCDPTEVELDNQIVTATQSNICDEDSATETCYTYDRNKCYTAVVPLVYGGETKMVETALTPDACYPD

SEQ ID NO: 15 - protein, 112 aa, Homo sapiens
FTVRETASTKGPSVFPLAPSSKSTSGGTAALGCLVKDYFPEPVTVSWNSGALTSGVHTFPAVLQSSGLYSLSSVVTVPSSSLGTQTYICNVNHKPSNTKVDKKVEPKSCDKT

SEQ ID NO: 16 - protein, 106 aa, Homo sapiens
TVAAPSVFIFPPSDEQLKSGTASVVCLLNNFYPREAKVQWKVDNALQSGNSQESVTEQDSKDSTYSLSSTLTLSKADYEKHKVYACEVTHQGLSSPVTKSFNRGEC

SEQ ID NO: 17 - protein, 106 aa, Homo sapiens
GQPKANPTVTLFPPSSEELQANKATLVCLISDFYPGAVTVAWKADGSPVKAGVETTKPSKQSNNKYAASSYLSLTPEQWKSHRSYSCQVTHEGSTVEKTVAPTECS

SEQ ID NO: 18 - protein, 365 aa, Homo sapiens
MAVMAPRTLLLLLSGALALTQTWAGSHSMRYFFTSVSRPGRGEPRFIAVGYVDDTQFVRFDSDAASQKMEPRAPWIEQEGPEYWDQETRNMKAHSQTDRANLGTLRGYYNQSEDGSHTIQIMYGCDVGPDGRFLRGYRQDAYDGKDYIALNEDLRSWTAADMAAQITKRKWEAVHAAEQRRVYLEGRCVDGLRRYLENGKETLQRTDPPKTHMTHHPISDHEATLRCWALGFYPAEITLTWQRDGEDQTQDTELVETRPAGDGTFQKWAAVVVPSGEEQRYTCHVQHEGLPKPLTLRWELSSQPTIPIVGIIAGLVLLGAVITGAVVAAVMWRRKSSDRKGGSYTQAASSDSAQGSDVSLTACKV

SEQ ID NO: 19 - protein, 365 aa, Homo sapiens
MAVMAPRTLLLLLSGALALTQTWAGSHSMRYFYTSVSRPGRGEPRFIAVGYVDDTQFVRFDSDAASQRMEPRAPWIEQEGPEYWDQETRNVKAQSQTDRVDLGTLRGYYNQSEDGSHTIQIMYGCDVGPDGRFLRGYRQDAYDGKDYIALNEDLRSWTAADMAAQITKRKWEAAHAAEQQRAYLEGRCVEWLRRYLENGKETLQRTDPPKTHMTHHPISDHEATLRCWALGFYPAEITLTWQRDGEDQTQDTELVETRPAGDGTFQKWAAVVVPSGEEQRYTCHVQHEGLPKPLTLRWELSSQPTIPIVGIIAGLVLLGAVITGAVVAAVMWRRKSSDRKGGSYTQAASSDSAQGSDVSLTACKV

SEQ ID NO: 20 - protein, 365 aa, Homo sapiens [sequence omitted]

SEQ ID NO: 21 - protein, 365 aa, Homo sapiens [sequence omitted]

SEQ ID NO: 22 - protein, 362 aa, Homo sapiens
MLVMAPRTVLLLLSAALALTETWAGSHSMRYFYTSVSRPGRGEPRFISVGYVDDTQFVRFDSDAASPREEPRAPWIEQEGPEYWDRNTQIYKAQAQTDRESLRNLRGYYNQSEAGSHTLQSMYGCDVGPDGRLLRGHDQYAYDGKDYIALNEDLRSWTAADTAAQITQRKWEAAREAEQRRAYLEGECVEWLRRYLENGKDKLERADPPKTHVTHHPISDHEATLRCWALGFYPAEITLTWQRDGEDQTQDTELVETRPAGDRTFQKWAAVVVPSGEEQRYTCHVQHEGLPKPLTLRWEPSSQSTVPIVGIVAGLAVLAVVVIGAVVAAVMCRRKSSGGKGGSYSQAACSDSAQGSDVSLTA

SEQ ID NO: 23 - protein, 365 aa, Homo sapiens
MRVMAPRALLLLLSGGLALTETWACSHSMRYFDTAVSRPGRGEPRFISVGYVDDTQFVRFDSDAASPRGEPRAPWVEQEGPEYWDRETQNYKRQAQADRVSLRNLRGYYNQSEDGSHTLQRMYGCDLGPDGRLLRGYDQSAYDGKDYIALNEDLRSWTAADTAAQITQRKLEAARAAEQLRAYLEGTCVEWLRRYLENGKETLQRAEPPKTHVTHHPLSDHEATLRCWALGFYPAEITLTWQRDGEDQTQDTELVETRPAGDGTFQKWAAVVVPSGQEQRYTCHMQHEGLQEPLTLSWEPSSQPTIPIMGIVAGLAVLVVLAVLGAVVTAMMCRRKSSGGKGGSCSQAACSNSAQGSDESLITCK

SEQ ID NO: 24 - protein, 275 aa, Homo sapiens
GSHSMRYFFTSVSRPGRGEPRFIAVGYVDDTQFVRFDSDAASQKMEPRAPWIEQEGPEYWDQETRNMKAHSQTDRANLGTLRGYYNQSEDGSHTIQIMYGCDVGPDGRFLRGYRQDAYDGKDYIALNEDLRSWTAADMAAQITKRKWEAVHAAEQRRVYLEGRCVDGLRRYLENGKETLQRTDPPKTHMTHHPISDHEATLRCWALGFYPAEITLTWQRDGEDQTQDTELVETRPAGDGTFQKWAAVVVPSGEEQRYTCHVQHEGLPKPLTLRWE

SEQ ID NO: 25 - protein, 275 aa, Homo sapiens
GSHSMRYFYTSVSRPGRGEPRFISVGYVDDTQFVRFDSDAASPREEPRAPWIEQEGPEYWDRNTQIYKAQAQTDRESLRNLRGYYNQSEAGSHTLQSMYGCDVGPDGRLLRGHDQYAYDGKDYIALNEDLRSWTAADTAAQITQRKWEAAREAEQRRAYLEGECVEWLRRYLENGKDKLERADPPKTHVTHHPISDHEATLRCWALGFYPAEITLTWQRDGEDQTQDTELVETRPAGDRTFQKWAAVVVPSGEEQRYTCHVQHEGLPKPLTLRWE

SEQ ID NO: 26 - protein, 275 aa, Homo sapiens
CSHSMRYFDTAVSRPGRGEPRFISVGYVDDTQFVRFDSDAASPRGEPRAPWVEQEGPEYWDRETQNYKRQAQADRVSLRNLRGYYNQSEDGSHTLQRMYGCDLGPDGRLLRGYDQSAYDGKDYIALNEDLRSWTAADTAAQITQRKLEAARAAEQLRAYLEGTCVEWLRRYLENGKETLQRAEPPKTHVTHHPLSDHEATLRCWALGFYPAEITLTWQRDGEDQTQDTELVETRPAGDGTFQKWAAVVVPSGQEQRYTCHMQHEGLQEPLTLSWE

SEQ ID NO: 27 - protein, 276 aa, Homo sapiens [sequence omitted]

SEQ ID NO: 28 - protein, 274 aa, Mus musculus
GPHSLRYFVTAVSRPGLGEPRFIAVGYVDDTQFVRFDSDADNPRFEPRAPWMEQEGPEYWEEQTQRAKSDEQWFRVSLRTAQRYYNQSKGGSHTFQRMFGCDVGSDWRLLRGYQQFAYDGRDYIALNEDLKTWTAADTAALITRRKWEQAGDAEYYRAYLEGECVEWLRRYLELGNETLLRTDSPKAHVTYHPRSQVDVTLRCWALGFYPADITLTWQLNGEDLTQDMELVETRPAGDGTFQKWAAVVVPLGKEQNYTCHVHHKGLPEPLTLRW

SEQ ID NO: 29 - protein, 275 aa, Homo sapiens
GSHSMRYFFTSVSRPGRGEPRFIAVGYVDDTQFVRFDSDAASQRMEPRAPWIEQEGPEYWDGETRKVKAHSQTHRVDLGTLRGAYNQSEAGSHTVQRMYGCDVGSDWRFLRGYHQYAYDGKDYIALKEDLRSWTAADMAAQTTKHKWEAAHVAEQLRAYLEGTCVEWLRRYLENGKETLQRTDAPKTHMTHHAVSDHEATLRCWALSFYPAEITLTWQRDGEDQTQDTELVETRPCGDGTFQKWAAVVVPSGQEQRYTCHVQHEGLPKPLTLRWE

SEQ ID NO: 30 - protein, 275 aa, Homo sapiens
GSHSMRYFFTSVSRPGRGEPRFIAVGYVDDTQFVRFDSDAASQRMEPRAPWIEQEGPEYWDGETRKVKAHSQTHRVDLGTLRGCYNQSEAGSHTVQRMYGCDVGSDWRFLRGYHQYAYDGKDYIALKEDLRSWTAADMCAQTTKHKWEAAHVAEQLRAYLEGTCVEWLRRYLENGKETLQRTDAPKTHMTHHAVSDHEATLRCWALSFYPAEITLTWQRDGEDQTQDTELVETRPCGDGTFQKWAAVVVPSGQEQRYTCHVQHEGLPKPLTLRWE

SEQ ID NO: 31 - protein, 276 aa, Homo sapiens
GSHSMRYFFTSVSRPGRGEPRFIAVGYVDDTQFVRFDSDAASQRMEPRAPWIEQEGPEYWDGETRKVKAHSQTHRVDLGTLRGAYNQSEAGSHTVQRMYGCDVGSDWRFLRGYHQYAYDGKDYIALKEDLRSWTAADMAAQTTKHKWEAAHVAEQLRAYLEGTCVEWLRRYLENGKETLQRTDAPKTHMTHHAVSDHEATLRCWALSFYPAEITLTWQRDGEDQTQDTELVETRPCGDGTFQKWAAVVVPSGQEQRYTCHVQHEGLPKPLTLRWEP

SEQ ID NO: 32 - protein, 276 aa, Homo sapiens
GSHSMRYFYTSVSRPGRGEPRFIAVGYVDDTQFVRFDSDAASQRMEPRAPWIEQEGPEYWDQETRNVKAQSQTDRVDLGTLRGYYNQSEDGSHTIQIMYGCDVGPDGRFLRGYRQDAYDGKDYIALNEDLRSWTAADMAAQITKRKWEAAHAAEQQRAYLEGRCVEWLRRYLENGKETLQRTDPPKTHMTHHPISDHEATLRCWALGFYPAEITLTWQRDGEDQTQDTELVETRPAGDGTFQKWAAVVVPSGEEQRYTCHVQHEGLPKPLTLRWEL

SEQ ID NO: 33 - protein, 276 aa, Homo sapiens
GSHSMRYFSTSVSRPGRGEPRFIAVGYVDDTQFVRFDSDAASQRMEPRAPWIEQEGPEYWDEETGKVKAHSQTDRENLRIALRYYNQSEAGSHTLQMMFGCDVGSDGRFLRGYHQYAYDGKDYIALKEDLRSWTAADMAAQITKRKWEAAHVAEQQRAYLEGTCVDGLRRYLENGKETLQRTDPPKTHMTHHPISDHEATLRCWALGFYPAEITLTWQRDGEDQTQDTELVETRPAGDGTFQKWAAVVVPSGEEQRYTCHVQHEGLPKPLTLRWEP

SEQ ID NO: 34 - protein, 276 aa, Homo sapiens
GSHSMRYFTTSVSRPGRGEPRFIAVGYVDDTQFVRFDSDAASQRMEPRAPWIEQEGPEYWDRNTRNVKAHSQIDRVDLGTLRGYYNQSEAGSHTIQMMYGCDVGSDGRFLRGYQQDAYDGKDYIALNEDLRSWTAADMAAQITQRKWEAARVAEQLRAYLEGTCVEWLRRYLENGKETLQRTDPPKTHMTHHAVSDHEATLRCWALSFYPAEITLTWQRDGEDQTQDTELVETRPAGDGTFQKWASVVVPSGQEQRYTCHVQHEGLPKPLTLRWEP

SEQ ID NO: 35 - protein, 276 aa, Homo sapiens
GSHSMRYFFTSVSRPGRGEPRFIAVGYVDDTQFVRFDSDAASQRMEPRAPWIEQEGPEYWDQETRNVKAQSQTDRVDLGTLRGYYNQSEAGSHTIQIMYGCDVGSDGRFLRGYRQDAYDGKDYIALNEDLRSWTAADMAAQITKRKWEAAHEAEQLRAYLDGTCVEWLRRYLENGKETLQRTDPPKTHMTHHPISDHEATLRCWALGFYPAEITLTWQRDGEDQTQDTELVETRPAGDGTFQKWAAVVVPSGEEQRYTCHVQHEGLPKPLTLRWEL

SEQ ID NO: 36 - protein, 276 aa, Homo sapiens
GSHSMRYFSTSVSRPGRGEPRFIAVGYVDDTQFVRFDSDAASQRMEPRAPWIEQEGPEYWDEETGKVKAHSQTDRENLRIALRYYNQSEAGSHTLQMMFGCDVGSDGRFLRGYHQYAYDGKDYIALKEDLRSWTAADMAAQITQRKWEAARVAEQLRAYLEGTCVDGLRRYLENGKETLQRTDPPKTHMTHHPISDHEATLRCWALGFYPAEITLTWQRDGEDQTQDTELVETRPAGDGTFQKWAAVVVPSGEEQRYTCHVQHEGLPKPLTLRWEP

SEQ ID NO: 37 - protein, 276 aa, Homo sapiens
GSHSMRYFSTSVSRPGRGEPRFIAVGYVDDTQFVRFDSDAASQRMEPRAPWIEQEGPEYWDEETGKVKAQSQTDRENLRIALRYYNQSEAGSHTLQMMFGCDVGSDGRFLRGYHQYAYDGKDYIALKEDLRSWTAADMAAQITKRKWEAAHVAEQQRAYLEGTCVDGLRRYLENGKETLQRTDPPKTHMTHHPISDHEATLRCWALGFYPAEITLTWQRDGEDQTQDTELVETRPAGDGTFQKWAAVVVPSGEEQRYTCHVQHEGLPKPLTLRWEP

SEQ ID NO: 38 - protein, 276 aa, Homo sapiens
GSHSMRYFYTSVSRPGRGEPRFIAVGYVDDTQFVRFDSDAASQRMEPRAPWIEQEGPEYWDRNTRKVKAQSQTDRVDLGTLRGYYNQSEDGSHTIQRMYGCDVGPDGRFLRGYQQDAYDGKDYIALNEDLRSWTAADMAAQITQRKWETAHEAEQWRAYLEGTCVEWLRRYLENGKETLQRTDAPKTHMTHHAVSDHEATLRCWALSFYPAEITLTWQRDGEDQTQDTELVETRPAGDGTFQKWASVVVPSGQEQRYTCHVQHEGLPKPLTLRWEP

SEQ ID NO: 39 - protein, 276 aa, Homo sapiens
  VARIANT (9)..(9): X1 is F, Y, S, or T
  VARIANT (44)..(44): X2 is K or R
  VARIANT (62)..(62): X3 is Q, G, E, or R
  VARIANT (63)..(63): X4 is N or E
  VARIANT (65)..(65): X5 is R or G
  VARIANT (66)..(66): X6 is N or K
  VARIANT (67)..(67): X7 is M or V
  VARIANT (70)..(70): X8 is H or Q
  VARIANT (73)..(73): X9 is T or I
  VARIANT (74)..(74): X10 is D or H
  VARIANT (76)..(76): X11 is A, V, or E
  VARIANT (77)..(77): X12 is N or D
  VARIANT (79)..(79): X13 is G or R
  VARIANT (80)..(80): X14 is T or I
  VARIANT (81)..(81): X15 is L or A
  VARIANT (82)..(82): X16 is R or L
  VARIANT (83)..(83): X17 is G or R
  VARIANT (90)..(90): X18 is A or D
  VARIANT (95)..(95): X19 is I, L, or V
  VARIANT (97)..(97): X20 is I, R or M
  VARIANT (99)..(99): X21 is F or Y
  VARIANT (105)..(105): X22 is S or P
  VARIANT (107)..(107): X23 is W or G
  VARIANT (114)..(114): X24 is R, H, or Q
  VARIANT (116)..(116): X25 is D or Y
  VARIANT (127)..(127): X26 is N or K
  VARIANT (142)..(142): X27 is T or I
  VARIANT (144)..(144): X28 is K or Q
  VARIANT (145)..(145): X29 is R or H
  VARIANT (149)..(149): X30 is A or T
  VARIANT (150)..(150): X31 is A or V
  VARIANT (151)..(151): X32 is H or R
  VARIANT (156)..(156): X33 is R, L, Q, or W
  VARIANT (158)..(158): X34 is V or A
  VARIANT (161)..(161): X35 is D or E
  VARIANT (163)..(163): X36 is R or T
  VARIANT (166)..(166): X37 is D or E
  VARIANT (167)..(167): X38 is W or G
  VARIANT (184)..(184): X39 is P or A
  VARIANT (193)..(193): X40 is P or A
  VARIANT (194)..(194): X41 is V or I
  VARIANT (207)..(207): X42 is S or G
  VARIANT (246)..(246): X43 is A or S
  VARIANT (253)..(253): X44 is Q or E
  VARIANT (276)..(276): X45 is P or L
GSHSMRYFXTSVSRPGRGEPRFIAVGYVDDTQFVRFDSDAASQXMEPRAPWIEQEGPEYWDXXTXXXKAXSQXXRXXLXXXXXYYNQSEXGSHTXQXMXGCDVGXDXRFLRGYXQXAYDGKDYIALXEDLRSWTAADMAAQXTXXKWEXXXEAEQXRXYLXGXCVXXLRRYLENGKETLQRTDXPKTHMTHHXXSDHEATLRCWALXFYPAEITLTWQRDGEDQTQDTELVETRPAGDGTFQKWAXVVVPSGXEQRYTCHVQHEGLPKPLTLRWEX

SEQ ID NO: 40 - protein, 276 aa, Homo sapiens [sequence omitted]

SEQ ID NO: 41 - protein, 276 aa, Homo sapiens
GSHSMRYFDTAMSRPGRGEPRFISVGYVDDTQFVRFDSDAASPREEPRAPWIEQEGPEYWDRNTQIFKTNTQTDRESLRNLRGYYNQSEAGSHTLQSMYGCDVGPDGRLLRGHNQYAYDGKDYIALNEDLRSWTAADTAAQITQRKWEAARVAEQDRAYLEGTCVEWLRRYLENGKDTLERADPPKTHVTHHPISDHEATLRCWALGFYPAEITLTWQRDGEDQTQDTELVETRPAGDRTFQKWAAVVVPSGEEQRYTCHVQHEGLPKPLTLRWEP

SEQ ID NO: 42 - protein, 276 aa, Homo sapiens
GSHSMRYFYTAMSRPGRGEPRFIAVGYVDDTQFVRFDSDAASPRMAPRAPWIEQEGPEYWDRNTQISKTNTQTYRESLRNLRGYYNQSEAGSHIIQRMYGCDVGPDGRLLRGYDQSAYDGKDYIALNEDLSSWTAADTAAQITQRKWEAAREAEQLRAYLEGLCVEWLRRYLENGKETLQRADPPKTHVTHHPISDHEATLRCWALGFYPAEITLTWQRDGEDQTQDTELVETRPAGDRTFQKWAAVVVPSGEEQRYTCHVQHEGLPKPLTLRWEP

SEQ ID NO: 43 - protein, 276 aa, Homo sapiens
GSHSMRYFYTSVSRPGRGEPRFISVGYVDDTQFVRFDSDAASPREEPRAPWIEQEGPEYWDRNTQICKTNTQTYRENLRTALRYYNQSEAGSHTLQRMYGCDVGPDGRLLRGHNQFAYDGKDYIALNEDLSSWTAADTAAQITQRKWEAARVAEQLRTYLEGTCVEWLRRYLENGKETLQRADPPKTHVTHHPISDHEATLRCWALGFYPAEITLTWQRDGEDQTQDTELVETRPAGDRTFQKWAAVVVPSGEEQRYTCHVQHEGLPKPLTLRWEP

SEQ ID NO: 44 - protein, 276 aa, Homo sapiens
GSHSMRYFHTAMSRPGRGEPRFITVGYVDDTLFVRFDSDATSPRKEPRAPWIEQEGPEYWDRETQISKTNTQTYRESLRNLRGYYNQSEAGSHTLQRMYGCDVGPDGRLLRGHNQYAYDGKDYIALNEDLRSWTAADTAAQISQRKLEAARVAEQLRAYLEGECVEWLRRYLENGKDKLERADPPKTHVTHHPISDHEATLRCWALGFYPAEITLTWQRDGEDQTQDTELVETRPAGDRTFQKWAAVVVPSGEEQRYTCHVQHEGLPKPLTLRWEP

SEQ ID NO: 45 - protein, 276 aa, Homo sapiens
GSHSMRYFYTAMSRPGRGEPRFIAVGYVDDTQFVRFDSDAASPRMAPRAPWIEQEGPEYWDRETQKYKRQAQTDRVSLRNLRGYYNQSEAGSHTLQRMYGCDVGPDGRLLRGHDQSAYDGKDYIALNEDLSSWTAADTAAQITQRKWEAAREAEQWRAYLEGLCVEWLRRYLENGKETLQRADPPKTHVTHHPISDHEATLRCWALGFYPAEITLTWQRDGEDQTQDTELVETRPAGDRTFQKWAAVVVPSGEEQRYTCHVQHEGLPKPLTLRWEP

SEQ ID NO: 46 - protein, 276 aa, Homo sapiens
GSHSMRYFYTAMSRPGRGEPRFIAVGYVDDTQFVRFDSDAASPRTEPRAPWIEQEGPEYWDRNTQIFKTNTQTYRENLRIALRYYNQSEAGSHIIQRMYGCDLGPDGRLLRGHDQSAYDGKDYIALNEDLSSWTAADTAAQITQRKWEAARVAEQLRAYLEGLCVEWLRRYLENGKETLQRADPPKTHVTHHPVSDHEATLRCWALGFYPAEITLTWQRDGEDQTQDTELVETRPAGDRTFQKWAAVVVPSGEEQRYTCHVQHEGLPKPLTLRWEP

SEQ ID NO: 47 - protein, 276 aa, Homo sapiens
  VARIANT (9)..(9): X1 is H, Y, or D
  VARIANT (11)..(11): X2 is A or S
  VARIANT (12)..(12): X3 is M or V
  VARIANT (24)..(24): X4 is A, S, or T
  VARIANT (32)..(32): X5 is Q or L
  VARIANT (41)..(41): X6 is A or T
  VARIANT (45)..(45): X7 is E, M K, or T
  VARIANT (46)..(46): X8 is A or T
  VARIANT (63)..(63): X9 is E or N
  VARIANT (66)..(66): X10 is I or K
  VARIANT (67)..(67): X11 is Y, F, S, or C
  VARIANT (70)..(70): X12 is N or Q
  VARIANT (71)..(71): X13 is A or T
  VARIANT (74)..(74): X14 is D or Y
  VARIANT (76)..(76): X15 is E or V
  VARIANT (77)..(77): X16 is S or N
  VARIANT (80)..(80): X17 is T, N, or I
  VARIANT (81)..(81): X18 is A or L
  VARIANT (82)..(82): X19 is L, or R
  VARIANT (83)..(83): X20 is R or G
  VARIANT (94)..(94): X21 is T or I
  VARIANT (95)..(95): X22 is L or I
  VARIANT (97)..(97): X23 is R or S
  VARIANT (131)..(131): X24 is R or S
  VARIANT (143)..(143): X25 is S or T
  VARIANT (147)..(147): X26 is L or W
  VARIANT (152)..(152): X27 is E OR V
  VARIANT (156)..(156): X28 is R, D, L or W
  VARIANT (158)..(158): X29 is A or T
  VARIANT (163)..(163): X30 is L, E or T
  VARIANT (177)..(177): X31 is E or D
  VARIANT (178)..(178): X32 is K or T
  VARIANT (180)..(180): X33 is E or Q
  VARIANT (194)..(194): X34 is I or V
GSHSMRYFXTXXSRPGRGEPRFIXVGYVDDTXFVRFDSDAXSPRXXPRAPWIEQEGPEYWDRXTQXXKTXXTQXYXXNLXXXXYYNQSEAGSHXXQXMYGCDLGPDGRLLRGHDQSAYDGKDYIALNEDLXSWTAADTAAQIXQRKXEAARXAEQXRXYLEGXCVEWLRRYLENGKXXLXRADPPKTHVTHHPXSDHEATLRCWALGFYPAEITLTWQRDGEDQTQDTELVETRPAGDRTFQKWAAVVVPSGEEQRYTCHVQHEGLPKPLTLRWEP

SEQ ID NO: 48 - protein, 276 aa, Homo sapiens
CSHSMKYFFTSVSRPGRGEPRFISVGYVDDTQFVRFDSDAASPRGEPRAPWVEQEGPEYWDRETQKYKRQAQTDRVSLRNLRGYYNQSEAGSHTLQWMCGCDLGPDGRLLRGYDQYAYDGKDYIALNEDLRSWTAADTAAQITQRKWEAAREAEQRRAYLEGTCVEWLRRYLENGKETLQRAEHPKTHVTHHPVSDHEATLRCWALGFYPAEITLTWQWDGEDQTQDTELVETRPAGDGTFQKWAAVMVPSGEEQRYTCHVQHEGLPEPLTLRWEP

SEQ ID NO: 49 - protein, 276 aa, Homo sapiens
GSHSMRYFYTAVSRPGRGEPHFIAVGYVDDTQFVRFDSDAASPRGEPRAPWVEQEGPEYWDRETQKYKRQAQTDRVSLRNLRGYYNQSEARSHIIQRMYGCDVGPDGRLLRGYDQYAYDGKDYIALNEDLRSWTAADTAAQITQRKWEAAREAEQLRAYLEGLCVEWLRRYLKNGKETLQRAEHPKTHVTHHPVSDHEATLRCWALGFYPAEITLTWQWDGEDQTQDTELVETRPAGDGTFQKWAAVVVPSGEEQRYTCHVQHEGLPEPLTLRWEP

SEQ ID NO: 50 - protein, 276 aa, Homo sapiens
GSHSMRYFYTAVSRPGRGEPHFIAVGYVDDTQFVRFDSDAASPRGEPRAPWVEQEGPEYWDRETQKYKRQAQTDRVSLRNLRGYYNQSEAGSHIIQRMYGCDVGPDGRLLRGYDQYAYDGKDYIALNEDLRSWTAADTAAQITQRKWEAAREAEQLRAYLEGLCVEWLRRYLKNGKETLQRAEHPKTHVTHHPVSDHEATLRCWALGFYPAEITLTWQWDGEDQTQDTELVETRPAGDGTFQKWAAVVVPSGEEQRYTCHVQHEGLPEPLTLRWEP

SEQ ID NO: 51 - protein, 276 aa, Homo sapiens
GSHSMRYFSTSVSWPGRGEPRFIAVGYVDDTQFVRFDSDAASPRGEPREPWVEQEGPEYWDRETQKYKRQAQADRVNLRKLRGYYNQSEDGSHTLQRMFGCDLGPDGRLLRGYNQFAYDGKDYIALNEDLRSWTAADTAAQITQRKWEAAREAEQRRAYLEGTCVEWLRRYLENGKETLQRAEHPKTHVTHHPVSDHEATLRCWALGFYPAEITLTWQWDGEDQTQDTELVETRPAGDGTFQKWAAVVVPSGEEQRYTCHVQHEGLPEPLTLRWKP

SEQ ID NO: 52 - protein, 276 aa, Homo sapiens
CSHSMRYFDTAVSRPGRGEPRFISVGYVDDTQFVRFDSDAASPRGEPRAPWVEQEGPEYWDRETQKYKRQAQADRVNLRKLRGYYNQSEDGSHTLQWMYGCDLGPDGRLLRGYDQSAYDGKDYIALNEDLRSWTAADTAAQITQRKWEAAREAEQWRAYLEGTCVEWLRRYLENGKETLQRAEHPKTHVTHHPVSDHEATLRCWALGFYPAEITLTWQRDGEDQTQDTELVETRPAGDGTFQKWAAVVVPSGEEQRYTCHVQHEGLPEPLTLRWEP

SEQ ID NO: 53 - protein, 276 aa, Homo sapiens
CSHSMRYFDTAVSRPGRGEPRFISVGYVDDTQFVRFDSDAASPRGEPRAPWVEQEGPEYWDRETQNYKRQAQADRVSLRNLRGYYNQSEDGSHTLQRMYGCDLGPDGRLLRGYDQSAYDGKDYIALNEDLRSWTAADTAAQITQRKLEAARAAEQLRAYLEGTCVEWLRRYLENGKETLQRAEPPKTHVTHHPLSDHEATLRCWALGFYPAEITLTWQRDGEDQTQDTELVETRPAGDGTFQKWAAVVVPSGQEQRYTCHMQHEGLQEPLTLSWEP

SEQ ID NO: 54 - protein, 276 aa, Homo sapiens
CSHSMRYFDTAVSRPGRGEPRFISVGYVDDTQFVRFDSDAASPRGEPRAPWVEQEGPEYWDRETQKYKRQAQADRVSLRNLRGYYNQSEDGSHTLQRMSGCDLGPDGRLLRGYDQSAYDGKDYIALNEDLRSWTAADTAAQITQRKLEAARAAEQLRAYLEGTCVEWLRRYLENGKETLQRAEPPKTHVTHHPLSDHEATLRCWALGFYPAEITLTWQRDGEDQTQDTELVETRPAGDGTFQKWAAVVVPSGQEQRYTCHMQHEGLQEPLTLSWEP

SEQ ID NO: 55 - protein, 276 aa, Homo sapiens
CSHSMRYFYTAVSRPGRGEPRFIAVGYVDDTQFVQFDSDAASPRGEPRAPWVEQEGPEYWDRETQKYKRQAQTDRVSLRNLRGYYNQSEAGSHTLQRMYGCDLGPDGRLLRGYNQFAYDGKDYIALNEDLRSWTAADTAAQITQRKWEAARTAEQLRAYLEGTCVEWLRRYLENGKKTLQRAEHPKTHVTHHPVSDHEATLRCWALGFYPAEITLTWQRDGEDQTQDTELVETRPAGDGTFQKWAAVVVPSGEEQRYTCHVQHEGLPEPLTLRWGP

SEQ ID NO: 56 - protein, 276 aa, Homo sapiens
CSHSMRYFYTAVSRPGRGEPHFIAVGYVDDTQFVRFDSDAASPRGEPRAPWVEQEGPEYWDRETQNYKRQAQTDRVNLRKLRGYYNQSEAGSHIIQRMYGCDLGPDGRLLRGHDQLAYDGKDYIALNEDLRSWTAADTAAQITQRKWEAAREAEQLRAYLEGTCVEWLRRYLENGKETLQRAEHPKTHVTHHPVSDHEATLRCWALGFYPAEITLTWQRDGEDQTQDTELVETRPAGDGTFQKWAAVVVPSGEEQRYTCHVQHEGLPEPLTLRWEP

SEQ ID NO: 57 - protein, 276 aa, Homo sapiens
  VARIANT (1)..(1): X1 is C or G
  VARIANT (6)..(6): X2 is R or K
  VARIANT (9)..(9): X3 is F, Y, S, or D
  VARIANT (14)..(14): X4 is R or W
  VARIANT (21)..(21): X5 is H or R
  VARIANT (24)..(24): X6 is A or S
  VARIANT (35)..(35): X7 is Q or R
  VARIANT (49)..(49): X8 is A or E
  VARIANT (66)..(66): X9 is N or K
  VARIANT (73)..(73): X10 is T or A
  VARIANT (77)..(77): X11 is S or N
  VARIANT (80)..(80): X12 is N or K
  VARIANT (90)..(90): X13 is A or D
  VARIANT (91)..(91): X14 is G or R
  VARIANT (94)..(94): X15 is T or I
  VARIANT (95)..(95): X16 is L or I
  VARIANT (97)..(97): X17 is W or R
  VARIANT (99)..(99): X18 is C, Y, F, or S
  VARIANT (103)..(103): X19 is L, or V
  VARIANT (113)..(113): X20 is Y or H
  VARIANT (114)..(114): X21 is D or N
  VARIANT (116)..(116): X22 is Y, F, S, or L
  VARIANT (147)..(147): X23 is L or W
  VARIANT (152)..(152): X24 is E, A, Or T
  VARIANT (156)..(156): X25 is R, L, or W
  VARIANT (163)..(163): X26 is L or T
  VARIANT (173)..(173): X27 is E OR K
  VARIANT (173)..(173): X27 is E or K
  VARIANT (177)..(177): X28 is E or K
  VARIANT (184)..(184): X29 is H or P
  VARIANT (194)..(194): X30 is R or V
  VARIANT (219)..(219): X31 is W or R
  VARIANT (248)..(248): X32 is V or M
  VARIANT (253)..(253): X33 is E or Q
  VARIANT (261)..(261): X34 is M or V
  VARIANT (267)..(267): X35 is P or Q
  VARIANT (273)..(273): X36 is R or S
  VARIANT (275)..(275): X37 is P or G
XSHSMXYFXTAVSXPGRGEPXFIXVGYVDDTQFVXFDSDAASPRGEPRXPWVEQEGPEYWDRETQXYKRQAQXDRVXLRXLRGYYNQSEXXSHXXQXMXGCDXGPDGRLLRGXXQXAYDGKDYIALNEDLRSWTAADTAAQITQRKXEAARXAEQXRAYLEGXCVEWLRRYLXNGKXTLQRAEXPKTHVTHHPXSDHEATLRCWALGFYPAEITLTWQXDGEDQTQDTELVETRPAGDGTFQKWAAVXVPSGXEQRYTCHXQHEGLXEPLTLXWXP

SEQ ID NO: 58 - protein, 284 aa, Homo sapiens
  VARIANT (89)..(89): X1= K or E
  VARIANT (107)..(107): X2= R or G
  VARIANT (157)..(157): X3= R or G
  VARIANT (158)..(158): X4= A or V
  VARIANT (255)..(255): X5= Q or P
  VARIANT (267)..(267): X6= P or S
GSHSLKYFHTSVSRPGRGEPRFISVGYVDDTQFVRFDNDAASPRMVPRAPWMEQEGSEYWDRETRSARDTAQIFRVNLRTLRGYYNQSXAGSHTLQWMHGCELGPDXRFLRGYEQFAYDGKDYLTLNEDLRSWTAVDTAAQISEQKSNDASEAEHQXXYLEDTCVEWLHKYLEKGKETLLHLEPPKTHVTHHPISDHEATLRCWALGFYPAEITLTWQQDGEGHTQDTELVETRPAGDGTFQKWAAVVVPSGEEXRYTCHVQHEGLXEPVTLRWKPASQPTIPI

SEQ ID NO: 59 - protein, 284 aa, Homo sapiens
  VARIANT (7)..(7): X1= Y or F
  VARIANT (50)..(50): X2= P or Q
  VARIANT (251)..(251): X3= S or P
  VARIANT (278)..(278): X4= P or L
GSHSLRXFSTAVSRPGRGEPRYIAVEYVDDTQFLRFDSDAAIPRMEPREXWVEQEGPQYWEWTTGYAKANAQTDRVALRNLLRRYNQSEAGSHTLQGMNGCDMGPDGRLLRGYHQHAYDGKDYISLNEDLRSWTAADTVAQITQRFYEAEEYAEEFRTYLEGECLELLRRYLENGKETLQRADPPKAHVAHHPISDHEATLRCWALGFYPAEITLTWQRDGEEQTQDTELVETRPAGDGTFQKWAAVVVPXGEEQRYTCHVQHEGLPQPLILRWEQSXQPTIPI

SEQ ID NO: 60 - protein, 284 aa, Homo sapiens
  VARIANT (13)..(13): X1= S or F
  VARIANT (27)..(27): X2= Y or H
  VARIANT (31)..(31): X3= T, S, or M
  VARIANT (34)..(34): X4= L or V
  VARIANT (54)..(54): X5= Q or R
  VARIANT (81)..(81): X6= P or L
  VARIANT (100)..(100): X7= G or D
  VARIANT (104)..(104): X8= G or V
  VARIANT (105)..(105): X9= S or C
  VARIANT (110)..(110): X10= L or I
  VARIANT (159)..(159): X11= Y or H
  VARIANT (169)..(169): X12= H or R
  VARIANT (171)..(171): X13= Y or H
  VARIANT (178)..(178): X14= M or T
  VARIANT (185)..(185): X15= P or A
  VARIANT (219)..(219): X16= R, W, or Q
  VARIANT (258)..(258): X17= T or M
  VARIANT (275)..(275): X18= K or E
GSHSMRYFSAAVXRPGRGEPRFIAMGXVDDXQFXRFDSDSACPRMEPRAPWVEXEGPEYWEEETRNTKAHAQTDRMNLQTXRGYYNQSEASSHTLQWMIXCDLXXDGRLXRGYEQYAYDGKDYLALNEDLRSWTAADTAAQISKRKCEAANVAEQRRAXLEGTCVEWLXRXLENGKEXLQRADPXKTHVTHHPVFDYEATLRCWALGFYPAEIILTWQXDGEDQTQDVELVETRPAGDGTFQKWAAVVVPSGEEQRYXCHVQHEGLPEPLMLRWXQSSLPTIPI

SEQ ID NO: 61 - protein, 119 aa, Homo sapiens
MSRSVALAVLALLSLSGLEAIQRTPKIQVYSRHPAENGKSNFLNCYVSGFHPSDIEVDLLKNGERIEKVEHSDLSFSKDWSFYLLYYTEFTPTEKDEYACRVNHVTLSQPKIVKWDRDM

SEQ ID NO: 62 - protein, 119 aa, Pan troglodytes; identical to SEQ ID NO: 61

SEQ ID NO: 63 - protein, 119 aa, Macaca mulatta
MSRSVALAVLALLSLSGLEAIQRTPKIQVYSRHPPENGKPNFLNCYVSGFHPSDIEVDLLKNGEKMGKVEHSDLSFSKDWSFYLLYYTEFTPNEKDEYACRVNHVTLSGPRTVKWDRDM

SEQ ID NO: 64 - protein, 118 aa, Bos taurus
MARFVALVLLGLLSLSGLDAIQRPPKIQVYSRHPPEDGKPNYLNCYVYGFHPPQIEIDLLKNGEKIKSEQSDLSFSKDWSFYLLSHAEFTPNSKDQYSCRVKHVTLEQPRIVKWDRDL

SEQ ID NO: 65 - protein, 119 aa, Mus musculus
MARSVTLVFLVLVSLTGLYAIQKTPQIQVYSRHPPENGKPNILNCYVTQFHPPHIEIQMLKNGKKIPKVEMSDMSFSKDWSFYILAHTEFTPTETDTYACRVKHASMAEPKTVYWDRDM

SEQ ID NO: 66 - protein, 6 aa, Artificial Sequence
  sulfatase motif
  VARIANT (1)..(1): Position 1 (X1) is present or absent and, when present, can be any amino acid, usually L, M, V, S or T, more usually L, M, S or V, with the proviso that, when the sulfatase motif is at the N-terminus of the target polypeptide, X1 is present.
  VARIANT (2)..(2): Position 2 (Z1) is cysteine or serine
  VARIANT (3)..(3): Position 3 (X2) can be any amino acid, though usually an aliphatic aa, a polar, uncharged aa, or a sulfur containing amino acid (e.g., other than an aromatic amino acid or a charged amino acid), usually S, T, A, V, G or C, more usually S, T, A, V or G.
  VARIANT (4)..(4): Position 4 (Z2) is either a proline or alanine residue (which can also be represented by "P/A")
  VARIANT (5)..(5): Position 5 (X3) can be any amino acid, though usually an aliphatic aa, a polar, uncharged aa, or a sulfur containing amino acid (e.g., other than an aromatic amino acid or a charged amino acid), usually S, T, A, V, G or C, more usually S, T, A, V or G.
  VARIANT (6)..(6): Position (Z3) is a basic amino acid (arginine, lysine, or histidine, usually lysine), or an aliphatic aa (alanine, glycine, leucine, valine, isoleucine, or proline, usually A, G, L, V, or I).
XXXXXX

SEQ ID NO: 67 - protein, 6 aa, Artificial Sequence
  sulfatase motif
  VARIANT (1)..(1): Position 1 (X1) is present or absent and, when present, can be any aa, usually L, M, V, S or T, more usually L, M, S or V, with the proviso that, when the sulfatase motif is at the N-terminus of the target polypeptide, X1 is present.
  VARIANT (3)..(3): Position (X2) can be any amino acid, though usually an aliphatic aa, a polar, uncharged aa, or a sulfur containing amino acid (e.g., other than an aromatic amino acid or a charged amino acid), usually S, T, A, V, G or C, more usually S, T, A, V or G.
  VARIANT (5)..(5): Position 5 (X3) can be any amino acid, though usually an aliphatic aa, a polar, uncharged aa, or a sulfur containing amino acid (e.g., other than an aromatic amino acid or a charged amino acid), usually S, T, A, V, G or C, more usually S, T, A, V or G.
  VARIANT (6)..(6): Position 6 (Z3) is a basic amino acid (arginine, lysine, or histidine, usually lysine), or an aliphatic aa (alanine, glycine, leucine, valine, isoleucine, or proline, usually A, G, L, V, or I).
XCXPXX

SEQ ID NO: 68 - protein, 5 aa, Artificial Sequence
  Sulfatase motif
  VARIANT (2)..(2): Position 2 (X1) is present or absent and, when present, can be any aa, usually L, M, V, S or T, more usually L, M, S or V, with the proviso that, when the sulfatase motif is at the N-terminus of the target polypeptide, X1 is present.
  VARIANT (4)..(4): Position 4 (X2) can be any amino acid, though usually an aliphatic aa, a polar, uncharged aa, or a sulfur containing amino acid (e.g., other than an aromatic amino acid or a charged amino acid), usually S, T, A, V, G or C, more usually S, T, A, V or G.
  VARIANT (5)..(5): Position 5 (Z3) is a basic amino acid (arginine, lysine, or histidine, usually lysine), or an aliphatic aa (alanine, glycine, leucine, valine, isoleucine, or proline, usually A, G, L, V, or I).
CXPXX

SEQ ID NO: 69 - protein, 5 aa, Artificial Sequence
  Sortase A Enzyme Site
  SITE (3)..(3): X5 can be any single amino acid.
  SITE (5)..(5): X can be a glycine or alanine.
LPXTX

SEQ ID NO: 70 - protein, 5 aa, Artificial Sequence
  Sortase enzyme conjugation partner sequence
GGGGG

SEQ ID NO: 71 - protein, 4 aa, Artificial Sequence
  Sortase enzyme conjugation partner sequence
GGGG

SEQ ID NO: 72 - protein, 5 aa, Artificial Sequence
  Sortase enzyme conjugation partner sequence
AAAAA

SEQ ID NO: 73 - protein, 4 aa, Artificial Sequence
  Sortase enzyme conjugation partner sequence
AAAA

SEQ ID NO: 74 - protein, 6 aa, Artificial Sequence
  Sortase A Enzyme Site
LPETGG

SEQ ID NO: 75 - protein, 6 aa, Artificial Sequence
  Sortase A Enzyme Site
LPETAA

SEQ ID NO: 76 - protein, 5 aa, Artificial Sequence
  Transglutaminase Enzyme Site
LLQGG

SEQ ID NO: 77 - protein, 4 aa, Artificial Sequence
  Transglutaminase Enzyme Site
LLQG

SEQ ID NO: 78 - protein, 6 aa, Artificial Sequence
  Transglutaminase Enzyme Site
LSLSQG

SEQ ID NO: 79 - protein, 6 aa, Artificial Sequence
  Transglutaminase Enzyme Site
LLQLQG

SEQ ID NO: 80 - protein, 276 aa, Homo sapiens
GSHSMRYFYTAMSRPGRGEPRFIAVGYVDDTQFVRFDSDAASPRTEPRAPWIEQEGPEYWDRNTQIFKTNTQTYRESLRNLRGYYNQSEAGSHIIQRMYGCDLGPDGRLLRGHDQSAYDGKDYIALNEDLSSWTAADTAAQITQRKWEAARVAEQLRAYLEGLCVEWLRRYLENGKETLQRADPPKTHVTHHPVSDHEATLRCWALGFYPAEITLTWQRDGEDQTQDTELVETRPAGDRTFQKWAAVVVPSGEEQRYTCHVQHEGLPKPLTLRWEP

SEQ ID NO: 81 - protein, 276 aa, Homo sapiens
GSHSMRYFYTAMSRPGRGEPRFITVGYVDDTLFVRFDSDATSPRKEPRAPWIEQEGPEYWDRETQISKTNTQTYRENLRTALRYYNQSEAGSHIIQRMYGCDVGPDGRLLRGYDQDAYDGKDYIALNEDLSSWTAADTAAQITQRKWEAARVAEQDRAYLEGLCVESLRRYLENGKETLQRADPPKTHVTHHPISDHEVTLRCWALGFYPAEITLTWQRDGEDQTQDTELVETRPAGDRTFQKWAAVVVPSGEEQRYTCHVQHEGLPKPLTLRWEP

SEQ ID NO: 82 - protein, 276 aa, Homo sapiens
GSHSMRYFYTAMSRPGRGEPRFITVGYVDDTLFVRFDSDATSPRKEPRAPWIEQEGPEYWDRETQISKTNTQTYRENLRTALRYYNQSEAGSHIIQRMYGCDVGPDGRLLRGYDQDAYDGKDYIALNEDLSSWTAADTAAQITQRKWEAARVAEQLRAYLEGLCVESLRRYLENGKETLQRADPPKTHVTHHPISDHEVTLRCWALGFYPAEITLTWQRDGEDQTQDTELVETRPAGDRTFQKWAAVVVPSGEEQRYTCHVQHEGLPKPLTLRWEP

SEQ ID NO: 83 - protein, 276 aa, Homo sapiens
GSHSMRYFYTAMSRPGRGEPRFIAVGYVDDTQFVRFDSDAASPRTEPRAPWIEQEGPEYWDGETRNMKASAQTYRENLRIALRYYNQSEAGSHIIQRMYGCDLGPDGRLLRGHDQSAYDGKDYIALNEDLSSWTAADTAAQITQRKWEAARVAEQLRAYLEGLCVEWLRRYLENGKETLQRADPPKTHVTHHPVSDHEATLRCWALGFYPAEITLTWQRDGEDQTQDTELVETRPAGDRTFQKWAAVVVPSGEEQRYTCHVQHEGLPKPLTLRWEP

SEQ ID NO: 84 - protein, 276 aa, Homo sapiens
  VARIANT (79)..(83): Residues 79-83 each can be any amino acid or any amino acid other than glycine in an embodiment it is the sequence GTLRG
  DISULFID (84)..(84): Residue 84 can form a disulfide bond with residue 139
  VARIANT (85)..(89): Residues 85-89 each can be any amino acid or any amino acid other than glycine, in an embodiment it is the sequence YNQSE
  VARIANT (134)..(138): Residues 134-138 each can be any amino acid or any amino acid other than glycine, in an embodiment it is the sequence TAADM
  DISULFID (139)..(139): Residue 139 can form a disulfide bond with residue 84
  VARIANT (140)..(144): Residues 140-144 each can be any amino acid or any amino acid other than glycine, in an embodiment it is the sequence AQITK
GSHSMRYFFTSVSRPGRGEPRFIAVGYVDDTQFVRFDSDAASQRMEPRAPWIEQEGPEYWDGETRKVKAHSQTHRVDLXXXXXCXXXXXAGSHTVQRMYGCDVGSDWRFLRGYHQYAYDGKDYIALKEDLRSWXXXXXCXXXXXHKWEAAHVAEQLRAYLEGTCVEWLRRYLENGKETLQRTDAPKTHMTHHAVSDHEATLRCWALSFYPAEITLTWQRDGEDQTQDTELVETRPAGDGTFQKWAAVVVPSGQEQRYTCHVQHEGLPKPLTLRWEP

SEQ ID NO: 85 - protein, 5 aa, Homo sapiens
GTLRG

SEQ ID NO: 86 - protein, 5 aa, Homo sapiens
YNQSE

SEQ ID NO: 87 - protein, 5 aa, Homo sapiens
TAADM

SEQ ID NO: 88 - protein, 5 aa, Homo sapiens
AQTTK

SEQ ID NO: 89 - protein, 33 aa, Homo sapiens
RMKQIEDKIEEILSKIYHIENEIARIKKLIGER

SEQ ID NO: 90 - protein, 32 aa, Homo sapiens
LSSIEKKQEEQTSWLIWISNELTLIRNELAQS

SEQ ID NO: 91 - protein, 31 aa, Homo sapiens
LSSIEKKLEEITSQLIQISNELTLIRNELAQ

SEQ ID NO: 92 - protein, 31 aa, Homo sapiens
LSSIEKKLEEITSQLIQIRNELTLIRNELAQ

SEQ ID NO: 93 - protein, 31 aa, Homo sapiens
LSSIEKKLEEITSQLQQIRNELTLIRNELAQ

SEQ ID NO: 94 - protein, 31 aa, Homo sapiens
LSSLEKKLEELTSQLIQLRNELTLLRNELAQ

SEQ ID NO: 95 - protein, 31 aa, Homo sapiens
ISSLEKKIEELTSQIQQLRNEITLLRNEIAQ

SEQ ID NO: 96 - protein, 47 aa, Homo sapiens
LEIEAAFLERENTALETRVAELRQRVQRLRNRVSQYRTRYGPLGGGK

SEQ ID NO: 97 - protein, 31 aa, Homo sapiens
LKSVENRLAVVENQLKTVIEELKTVKDLLSN

SEQ ID NO: 98 - protein, 31 aa, Homo sapiens
LARIEEKLKTIKAQLSEIASTLNMIREQLAQ

SEQ ID NO: 99 - protein, 31 aa, Homo sapiens
VSRLEEKVKTLKSQVTELASTVSLLREQVAQ

SEQ ID NO: 100 - protein, 30 aa, Homo sapiens
IQSEKKIEDISSLIGQIQSEITLIRNEIAQ

SEQ ID NO: 101 - protein, 31 aa, Homo sapiens
LMSLEKKLEELTQTLMQLQNELSMLKNELAQ

SEQ ID NO: 102 - protein, 18 aa, Homo sapiens
VDLEGSTSNGRQCAGIRL

SEQ ID NO: 103 - protein, 27 aa, Homo sapiens
EDDVTTTEELAPALVPPPKGTCAGWMA

SEQ ID NO: 104 - protein, 27 aa, Homo sapiens
GHDQETTTQGPGVLLPLPKGACTGQMA

SEQ ID NO: 105 - protein, 64 aa, Homo sapiens
VTAFSNMDDMLQKAHLVIEGTFIYLRDSTEFFIRVRDGWKKLQLGELIPIPADSPPPPALSSNP

SEQ ID NO: 106 - protein, 133 aa, Homo sapiens [sequence omitted]

SEQ ID NO: 107 - protein, 251 aa, Homo sapiens
ELCDDDPPEIPHATFKAMAYKEGTMLNCECKRGFRRIKSGSLYMLCTGNSSHSSWDNQCQCTSSATRNTTKQVTPQPEEQKERKTTEMQSPMQPVDQASLPGHCREPPPWENEATERIYHFVVGQMVYYQCVQGYRALHRGPAESVCKMTHGKTRWTQPQLICTGEMETSQFPGEEKPQASPEGRPESETSCLVTTTDFQIQTEMAATMETSIFTTEYQVAVAGCVFLLISVLLLSGLTWQRRQRKSRRTI

SEQ ID NO: 108 - protein, 524 aa, Homo sapiens
VNGTSQFTCFYNSRANISCVWSQDGALQDTSCQVHAWPDRRRWNQTCELLPVSQASWACNLILGAPDSQKLTTVDIVTLRVLCREGVRWRVMAIQDFKPFENLRLMAPISLQVVHVETHRCNISWEISQASHYFERHLEFEARTLSPGHTWEEAPLLTLKQKQEWICLETLTPDTQYEFQVRVKPLQGEFTTWSPWSQPLAFRTKPAALGKDTIPWLGHLLVGLSGAFGFIILVYLLINCRNTGPWLKKVLKCNTPDPSKFFSQLSSEHGGDVQKWLSSPFPSSSFSPGGLAPEISPLEVLERDKVTQLLLQQDKVPEPASLSSNHSLTSCFTNQGYFFFHLPDALEIEACQVYFTYDPYSEEDPDEGVAGAPTGSSPQPLQPLSGEDDAYCTFPSRDDLLLFSPSLLGGPSPPSTAPGGSGAGEERMPPSLQERVPRDWDPQPLGPPTPGVPDLVDFQPPPELVLREAGEEVPDAGPREGVSFPWSRPPGQGEFRALNARLPLNTDAYLSLQELQGQDPTHLV

SEQ ID NO: 109 - protein, 347 aa, Homo sapiens
LNTTILTPNGNEDTTADFFLTTMPTDSLSVSTLPLPEVQCFVFNVEYMNCTWNSSSEPQPTNLTLHYWYKNSDNDKVQKCSHYLFSEEITSGCQLQKKEIHLYQTFVVQLQDPREPRRQATQMLKLQNLVIPWAPENLTLHKLSESQLELNWNNRFLNHCLEHLVQYRTDWDHSWTEQSVDYRHKFSLPSVDGQKRYTFRVRSRFNPLCGSAQHWSEWSHPIHWGSNTSKENPFLFALEAVVISVGSMGLIISLLCVYFWLERTMPRIPTLKNLEDLVTEYHGNFSAWSGVSKGLAESLQPDYSERLCLVSEIPPKGGALGEGPGASPCNQHSPYWAPPCYTLKPET

SEQ ID NO: 110 - protein, 133 aa, Homo sapiens
  VARIANT (16)..(16): X is any amino acid other than His. In some cases, X is Ala or Thr.
  VARIANT (42)..(42): X is any amino acid other than Phe. In some cases, X is Ala.
APTSSSTKKTQLQLEXLLLDLQMILNGINNYKNPKLTRMLTXKFYMPKKATELKHLQCLEEELKPLEEVLNLAQSKNFHLRPRDLISNINVIVLELKGSETTFMCEYADETATIVEFLNRWITFCQSIISTLT

SEQ ID NO: 111 - protein, 281 aa, Homo sapiens
MQQPFNYPYPQIYWVDSSASSPWAPPGTVLPCPTSVPRRPGQRRPPPPPPPPPLPPPPPPPPLPPLPLPPLKKRGNHSTGLCLLVMFFMVLVALVGLGLGMFQLFHLQKELAELRESTSQMHTASSLEKQIGHPSPPPEKKELRKVAHLTGKSNSRSMPLEWEDTYGIVLLSGVKYKKGGLVINETGLYFVYSKVYFRGQSCNNLPLSHKVYMRNSKYPQDLVMMEGKMMSYCTTGQMWARSSYLGAVFNLTSADHLYVNVSELSLVNFEESQTFFGLYKL

SEQ ID NO: 112 - protein, 179 aa, Homo sapiens
QLFHLQKELAELRESTSQMHTASSLEKQIGHPSPPPEKKELRKVAHLTGKSNSRSMPLEWEDTYGIVLLSGVKYKKGGLVINETGLYFVYSKVYFRGQSCNNLPLSHKVYMRNSKYPQDLVMMEGKMMSYCTTGQMWARSSYLGAVFNLTSADHLYVNVSELSLVNFEESQTFFGLYKL

SEQ ID NO: 113 - protein, 335 aa, Homo sapiens
MLGIWTLLPLVLTSVARLSSKSVNAQVTDINSKGLELRKTVTTVETQNLEGLHHDGQFCHKPCPPGERKARDCTVNGDEPDCVPCQEGKEYTDKAHFSSKCRRCRLCDEGHGLEVEINCTRTQNTKCRCKPNFFCNSTVCEHCDPCTKCEHGIIKECTLTSNTKCKEEGSRSNLGWLCLLLLPIPLIVWVKRKEVQKTCRKHRKENQGSHESPTLNPETVAINLSDVDLSKYITTIAGVMTLSQVKGFVRKNGVNEAKIDEIKNDNVQDTAEQKVQLLRNWHQLHGKKEAYDTLIKDLKKANLCTLAEKIQTIILKDITSDSENSNFRNEIQSLV

SEQ ID NO: 114 - protein, 245 aa, Homo sapiens
MRIFAVFIFMTYWHLLNAFTVTVPKDLYVVEYGSNMTIECKFPVEKQLDLAALIVYWEMEDKNIIQFVHGEEDLKVQHSSYRQRARLLKDQLSLGNAALQITDVKLQDAGVYRCMISYGGADYKRITVKVNAPYNKINQRILVVDPVTSEHELTCQAEGYPKAEVIWTSSDHQVLSGKTTTTNSKREEKLFNVTSTLRINTTTNEIFYCTFRRLDPEENHTAELVIPGNILNVSIKICLTLSPST

SEQ ID NO: 115 - protein, 219 aa, Homo sapiens
FTVTVPKDLYVVEYGSNMTIECKFPVEKQLDLAALIVYWEMEDKNIIQFVHGEEDLKVQHSSYRQRARLLKDQLSLGNAALQITDVKLQDAGVYRCMISYGGADYKRITVKVNAPYNKINQRILVVDPVTSEHELTCQAEGYPKAEVIWTSSDHQVLSGKTTTTNSKREEKLFNVTSTLRINTTTNEIFYCTFRRLDPEENHTAELVIPGNILNVSIKI

SEQ ID NO: 116 - protein, 124 aa, Homo sapiens
AFTVTVPKDLYVVEYGSNMTIECKFPVEKQLDLAALIVYWEMEDKNIIQFVHGEEDLKTQHSSYRQRARLLKDQLSLGNAALQITDVKLQDAGVYRCMISYGGADYKRITVKVNAPYAAALHEH

SEQ ID NO: 117 - protein, 268 aa, Homo sapiens
PGWFLDSPDRPWNPPTFSPALLVVTEGDNATFTCSFSNTSESFVLNWYRMSPSNQTDKLAAFPEDRSQPGQDCRFRVTQLPNGRDFHMSVVRARRNDSGTYLCGAISLAPKAQIKESLRAELRVTERRAEVPTAHPSPSPRPAGQFQTLVVGVVGGLLGSLVLLVWVLAVICSRAARGTIGARRTGQPLKEDPSAVPVFSVDYGELDFQWREKTPEPPVPCVPEQTEYATIVFPSGMGTSSPARRGSADGPRSAQPLRPEDGHCSWPL

SEQ ID NO: 118 - protein, 208 aa, Homo sapiens [sequence omitted]

SEQ ID NO: 119 - protein, 104 aa, Homo sapiens
VIHVTKEVKEVATLSCGHNVSVEELAQTRIYWQKEKKMVLTMMSGDMNIWPEYKNRTIFDITNNLSIVILALRPSDEGTYECVVLKYEKDAFKREHLAEVTLSV

SEQ ID NO: 120 - protein, 220 aa, Homo sapiens
MLRLLLALNLFPSIQVTGNKILVKQSPMLVAYDNAVNLSCKYSYNLFSREFRASLHKGLDSAVEVCVVYGNYSQQLQVYSKTGFNCDGKLGNESVTFYLQNLYVNQTDIYFCKIEVMYPPPYLDNEKSNGTIIHVKGKHLCPSPLFPGPSKPFWVLVVVGGVLACYSLLVTVAFIIFWVRSKRSRLLHSDYMNMTPRRPGPTRKHYQPYAPPRDFAAYRS

SEQ ID NO: 121 - protein, 123 aa, Homo sapiens
MLRLLLALNLFPSIQVTGNKILVKQSPMLVAYDNAVNLSWKHLCPSPLFPGPSKPFWVLVVVGGVLACYSLLVTVAFIIFWVRSKRSRLLHSDYMNMTPRRPGPTRKHYQPYAPPRDFAAYRS

SEQ ID NO: 122 - protein, 101 aa, Homo sapiens
MLRLLLALNLFPSIQVTGKHLCPSPLFPGPSKPFWVLVVVGGVLACYSLLVTVAFIIFWVRSKRSRLLHSDYMNMTPRRPGPTRKHYQPYAPPRDFAAYRS

SEQ ID NO: 123 - protein, 224 aa, Homo sapiens
APLKIQAYFNETADLPCQFANSQNQSLSELVVFWQDQENLVLNEVYLGKEKFDSVHSKYMNRTSFDSDSWTLRLHNLQIKDKGLYQCIIHHKKPTGMIRIHQMNSELSVLANFSQPEIVPISNITENVYINLTCSSIHGYPEPKKMSVLLRTKNSTIEYDGIMQKSQDNVTELYDVSISLSVSFPDVTSNMTIFCILETDKTRLLSSPFSIELEDPQPPPDHIP

SEQ ID NO: 124 - protein, 110 aa, Homo sapiens
APLKIQAYFNETADLPCQFANSQNQSLSELVVFWQDQENLVLNEVYLGKEKFDSVHSKYMNRTSFDSDSWTLRLHNLQIKDKGLYQCIIHHKKPTGMIRIHQMNSELSVL

SEQ ID NO: 125 - protein, 254 aa, Homo sapiens
MEYASDASLDPEAPWPPAPRARACRVLPWALVAGLLLLLLLAAACAVFLACPWAVSGARASPGSAASPRLREGPELSPDDPAGLLDLRQGMFAQLVAQNVLLIDGPLSWYSDPGLAGVSLTGGLSYKEDTKELVVAKAGVYYVFFQLELRRVVAGEGSGSVSLALHLQPLRSAAGAAALALTVDLPPASSEARNSAFGFQGRLLHLSAGQRLGVHLHTEARARHAWQLTQGATVLGLFRVTPEIPAGLPSPRSE

SEQ ID NO: 126 - protein, 174 aa, Homo sapiens
PAGLLDLRQGMFAQLVAQNVLLIDGPLSWYSDPGLAGVSLTGGLSYKEDTKELVVAKAGVYYVFFQLELRRVVAGEGSGSVSLALHLQPLRSAAGAAALALTVDLPPASSEARNSAFGFQGRLLHLSAGQRLGVHLHTEARARHAWQLTQGATVLGLFRVTPEIPAGLPSPRSE

SEQ ID NO: 127 - protein, 175 aa, Homo sapiens
DPAGLLDLRQGMFAQLVAQNVLLIDGPLSWYSDPGLAGVSLTGGLSYKEDTKELVVAKAGVYYVFFQLELRRVVAGEGSGSVSLALHLQPLRSAAGAAALALTVDLPPASSEARNSAFGFQGRLLHLSAGQRLGVHLHTEARARHAWQLTQGATVLGLFRVTPEIPAGLPSPRSE

SEQ ID NO: 128 - protein, 167 aa, Homo sapiens
DPAGLLDLRQGMFAQLVAQNVLLIDGPLSWYSDPGLAGVSLTGGLSYKEDTKELVVAKAGVYYVFFQLELRRVVAGEGSGSVSLALHLQPLRSAAGAAALALTVDLPPASSEARNSAFGFQGRLLHLSAGQRLGVHLHTEARARHAWQLTQGATVLGLFRVTPEIPA

SEQ ID NO: 129 - protein, 255 aa, Homo sapiens
MGNSCYNIVATLLLVLNFERTRSLQDPCSNCPAGTFCDNNRNQICSPCPPNSFSSAGGQRTCDICRQCKGVFRTRKECSSTSNAECDCTPGFHCLGAGCSMCEQDCKQGQELTKKGCKDCCFGTFNDQKRGICRPWTNCSLDGKSVLVNGTKERDVVCGPSPADLSPGASSVTPPAPAREPGHSPQIISFFLALTSTALLFLLFFLTLRFSVVKRGRKKLLYIFKQPFMRPVQTTQEEDGCSCRFPEEEEGGCEL

SEQ ID NO: 130 - protein, 5 aa, Artificial Sequence
  Peptide linker
GSGGS

SEQ ID NO: 131 - protein, 4 aa, Artificial Sequence
  Peptide linker
GGGS

SEQ ID NO: 132 - protein, 4 aa, Artificial Sequence
  Peptide linker
GGSG

SEQ ID NO: 133 - protein, 5 aa, Artificial Sequence
  Peptide linker
GGSGG

SEQ ID NO: 134 - protein, 5 aa, Artificial Sequence
  Peptide linker
GSGSG

SEQ ID NO: 135 - protein, 5 aa, Artificial Sequence
  Peptide linker
GSGGG

SEQ ID NO: 136 - protein, 5 aa, Artificial Sequence
  Peptide linker
GGGSG

SEQ ID NO: 137 - protein, 5 aa, Artificial Sequence
  Peptide linker
GSSSG

SEQ ID NO: 138 - protein, 5 aa, Artificial Sequence
  Peptide linker
GSSSS

SEQ ID NO: 139 - protein, 5 aa, Artificial Sequence
  Peptide linker
GGGGS

SEQ ID NO: 140 - protein, 5 aa, Artificial Sequence
  Peptide linker
  PEPTIDE (1)..(5): X1-X5 are selected from glycine and serine, and one of which may be a leucine, cysteine, methionine  or alanine.
XXXXX

SEQ ID NO: 141 - protein, 10 aa, Artificial Sequence
  Peptide linker
GCGGSGGGGS

SEQ ID NO: 142 - protein, 15 aa, Artificial Sequence
  Peptide linker
GCGASGGGGSGGGGS

SEQ ID NO: 143 - protein, 20 aa, Artificial Sequence
  Peptide linker
GCGGSGGGGSGGGGSGGGGS

SEQ ID NO: 144 - protein, 15 aa, Artificial Sequence
  Peptide linker
GCGGSGGGGSGGGGS

SEQ ID NO: 145 - protein, 9 aa, Artificial Sequence
  Epitope Tag
YPYDVPDYA

SEQ ID NO: 146 - protein, 10 aa, Artificial Sequence
  Epitope Tag
EQKLISEEDL

SEQ ID NO: 147 - protein, 5 aa, Artificial Sequence
  Affinity Domain
HHHHH

SEQ ID NO: 148 - protein, 6 aa, Artificial Sequence
  Affinity Domain
HHHHHH

SEQ ID NO: 149 - protein, 8 aa, Artificial Sequence
  Affinity Domain
DYKDDDDK

SEQ ID NO: 150 - protein, 8 aa, Artificial Sequence
  Affinity Domain
WSHPQFEK

SEQ ID NO: 151 - protein, 5 aa, Artificial Sequence
  Affinity Domain
RYIRS

SEQ ID NO: 152 - protein, 4 aa, Artificial Sequence
  Affinity Domain
FHHT

SEQ ID NO: 153 - protein, 17 aa, Artificial Sequence
  Affinity Domain
WEAAAREACCRECCARA

SEQ ID NO: 154 - protein, 586 aa, Homo sapiens
LAGETGQEAAPLDGVLANPPNISSLSPRQLLGFPCAEVSGLSTERVRELAVALAQKNVKLSTEQLRCLAHRLSEPPEDLDALPLDLLLFLNPDAFSGPQACTRFFSRITKANVDLLPRGAPERQRLLPAALACWGVRGSLLSEADVRALGGLACDLPGRFVAESAEVLLPRLVSCPGPLDQDQQEAARAALQGGGPPYGPPSTWSVSTMDALRGLLPVLGQPIIRSIPQGIVAAWRQRSSRDPSWRQPERTILRPRFRREVEKTACPSGKKAREIDESLIFYKKWELEACVDAALLATQMDRVNAIPFTYEQLDVLKHKLDELYPQGYPESVIQHLGYLFLKMSPEDIRKWNVTSLETLKALLEVNKGHEMSPQVATLIDRFVKGRGQLDKDTLDTLTAFYPGYLCSLSPEELSSVPPSSIWAVRPQDLDTCDPRQLDVLYPKARLAFQNMNGSEYFVKIQSFLGGAPTEDLKALSQQNVSMDLATFMKLRTDAVLPLTVAEVQKLLGPHVEGLKAEERHRPVRDWILRQRQDDLDTLGLGLQGGIPNGYLVLDLSMQEALSGTPCLLGPGPVLTVLALLLASTLA

SEQ ID NO: 155 - protein, 10 aa, Homo sapiens
KLLGPHVEGL

SEQ ID NO: 156 - protein, 10 aa, Homo sapiens
AFYPGYLCSL

SEQ ID NO: 157 - protein, 9 aa, Homo sapiens
VLPLTVAEV

SEQ ID NO: 158 - protein, 9 aa, Homo sapiens
ELAVALAQK

SEQ ID NO: 159 - protein, 9 aa, Homo sapiens
ALQGGGPPY

SEQ ID NO: 160 - protein, 9 aa, Homo sapiens
FYPGYLCSL

SEQ ID NO: 161 - protein, 9 aa, Homo sapiens
LYPKARLAF

SEQ ID NO: 162 - protein, 15 aa, Homo sapiens
LLFLLFSLGWVGPSR

SEQ ID NO: 163 - protein, 15 aa, Homo sapiens
VNKGHEMSPQAPRRP

SEQ ID NO: 164 - protein, 15 aa, Homo sapiens
FMKLRTDAVLPLTVA

SEQ ID NO: 165 - protein, 10 aa, Homo sapiens
DAALLATQMD

SEQ ID NO: 166 - protein, 1055 aa, Homo sapiens
MELAALCRWGLLLALLPPGAASTQVCTGTDMKLRLPASPETHLDMLRHLYQGCQVVQGNLELTYLPTNASLSFLQDIQEVQGYVLIAHNQVRQVPLQRLRIVRGTQLFEDNYALAVLDNGDPLNNTTPVTGASPGGLRELQLRSLTEILKGGVLIQRNPQLCYQDTILWKDIFHKNNQLALTLIDTNRSRACHPCSPMCKGSRCWGESSEDCQSLTRTVCAGGCARCKGPLPTDCCHEQCAAGCTGPKHSDCLACLHFNHSGICELHCPALVTYNTDTFESMPNPEGRYTFGASCVTACPYNYLSTDVGSCTLVCPLHNQEVTAEDGTQRCEKCSKPCARVCYGLGMEHLREVRAVTSANIQEFAGCKKIFGSLAFLPESFDGDPASNTAPLQPEQLQVFETLEEITGYLYISAWPDSLPDLSVFQNLQVIRGRILHNGAYSLTLQGLGISWLGLRSLRELGSGLALIHHNTHLCFVHTVPWDQLFRNPHQALLHTANRPEDECVGEGLACHQLCARGHCWGPGPTQCVNCSQFLRGQECVEECRVLQGLPREYVNARHCLPCHPECQPQNGSVTCFGPEADQCVACAHYKDPPFCVARCPSGVKPDLSYMPIWKFPDEEGACQPCPINCTHSCVDLDDKGCPAEQRASPLTSIISAVVGILLVVVLGVVFGILIKRRQQKIRKYTMRRLLQETELVEPLTPSGAMPNQAQMRILKETELRKVKVLGSGAFGTVYKGIWIPDGENVKIPVAIKVLRENTSPKANKEILDEAYVMAGVGSPYVSRLLGICLTSTVQLVTQLMPYGCLLDHVRENRGRLGSQDLLNWCMQIAKGMSYLEDVRLVHRDLAARNVLVKSPNHVKITDFGLARLLDIDETEYHADGGKVPIKWMALESILRRRFTHQSDVWSYGVTVWELMTFGAKPYDGIPAREIPDLLEKGERLPQPPICTIDVYMIMVKCWMIDSECRPRFRELVSEFSRMARDPQRFVVIQNEDLGPASPLDSTFYRSLLEDDDMGDLVDAEEYLVPQQGFFCPDPAPGAGGMVHHRHRSSSTRNM

SEQ ID NO: 167 - protein, 184 aa, Homo sapiens [sequence omitted]

SEQ ID NO: 168 - protein, 502 aa, Homo sapiens
MDFLLLQDPASTCVPEPASQHTLRSGPGCLQQPEQQGVRDPGGIWAKLGAAEASAERLQGRRSRGASGSEPQQMGSDVRDLNALLPAVPSLGGGGGCALPVSGAAQWAPVLDFAPPGASAYGSLGGPAPPPAPPPPPPPPPHSFIKQEPSWGGAEPHEEQCLSAFTVHFSGQFTGTAGACRYGPFGPPPPSQASSGQARMFPNAPYLPSCLESQPAIRNQGYSTVTFDGTPSYGHTPSHHAAQFPNHSFKHEDPMGQQGSLGEQQYSVPPPVYGCHTPTDSCTGSQALLLRTPYSSDNLYQMTSQLECMTWNQMNLGATLKGHSTGYESDNHTTPILCGAQYRIHTHGVFRGIQDVRRVPGVAPTLVRSASETSEKRPFMCAYPGCNKRYFKLSHLQMHSRKHTGEKPYQCDFKDCERRFSRSDQLKRHQRRHTGVKPFQCKTCQRKFSRSDHLKTHTRTHTGEKPFSCRWPSCQKKFARSDELVRHHNMHQRNMTKLQLAL

SEQ ID NO: 169 - protein, 261 aa, Homo sapiens
MAVTACQGLGFVVSLIGIAGIIAATCMDQWSTQDLYNNPVTAVFNYQGLWRSCVRESSGFTECRGYFTLLGLPAMLQAVRALMIVGIVLGAIGLLVSIFALKCIRIGSMEDSAKANMTLTSGIMFIVSGLCAIAGVSVFANMLVTNFWMSTANMYTGMGGMVQTVQTRYTFGAALFVGWVAGGLTLIGGVMMCIACRGLAPEETNYKAVSYHASGHSVAYKPGGFKASTGFGSNTKNKKIYDGGARTEDEVQSYPSKHDYV

SEQ ID NO: 170 - protein, 15 aa, Homo sapiens
TEDEVQSYPSKHDYV

SEQ ID NO: 171 - protein, 12 aa, Homo sapiens
EVQSYPSKHDYV

SEQ ID NO: 172 - protein, 214 aa, Homo sapiens
DIQMTQSPSSLSASVGDRVTITCRASQDVNTAVAWYQQKPGKAPKLLIYSASFLYSGVPSRFSGSRSGTDFTLTISSLQPEDFATYYCQQHYTTPPTFGQGTKVEIKRTVAAPSVFIFPPSDEQLKSGTASVVCLLNNFYPREAKVQWKVDNALQSGNSQESVTEQDSKDSTYSLSSTLTLSKADYEKHKVYACEVTHQGLSSPVTKSFNRGEC

SEQ ID NO: 173 - protein, 450 aa, Homo sapiens
EVQLVESGGGLVQPGGSLRLSCAASGFNIKDTYIHWVRQAPGKGLEWVARIYPTNGYTRYADSVKGRFTISADTSKNTAYLQMNSLRAEDTAVYYCSRWGGDGFYAMDYWGQGTLVTVSSASTKGPSVFPLAPSSKSTSGGTAALGCLVKDYFPEPVTVSWNSGALTSGVHTFPAVLQSSGLYSLSSVVTVPSSSLGTQTYICNVNHKPSNTKVDKKVEPKSCDKTHTCPPCPAPELLGGPSVFLFPPKPKDTLMISRTPEVTCVVVDVSHEDPEVKFNWYVDGVEVHNAKTKPREEQYNSTYRVVSVLTVLHQDWLNGKEYKCKVSNKALPAPIEKTISKAKGQPREPQVYTLPPSREEMTKNQVSLTCLVKGFYPSDIAVEWESNGQPENNYKTTPPVLDSDGSFFLYSKLTVDKSRWQQGNVFSCSVMHEALHNHYTQKSLSLSPGK

SEQ ID NO: 174 - protein, 107 aa, Homo sapiens [sequence omitted]

SEQ ID NO: 175 - protein, 120 aa, Homo sapiens [sequence omitted]

SEQ ID NO: 176 - protein, 120 aa, Homo sapiens [sequence omitted]

SEQ ID NO: 177 - protein, 107 aa, Homo sapiens [sequence omitted]

SEQ ID NO: 178 - protein, 9 aa, Homo sapiens
SLLMWITQC

SEQ ID NO: 179 - protein, 11 aa, Homo sapiens
RASQDVNTAVA

SEQ ID NO: 180 - protein, 6 aa, Homo sapiens
SASFLY

SEQ ID NO: 181 - protein, 8 aa, Homo sapiens
QQHYTTPP

SEQ ID NO: 182 - protein, 8 aa, Homo sapiens
GFNIKDTY

SEQ ID NO: 183 - protein, 8 aa, Homo sapiens
IYPTNGYT

SEQ ID NO: 184 - protein, 13 aa, Homo sapiens
SRWGGDGFYAMDY

SEQ ID NO: 185 - protein, 242 aa, Homo sapiens
EVQLVESGGGLVQPGGSLRLSCAASGFNIKDTYIHWVRQAPGKGLEWVARIYPTNGYTRYADSVKGRFTISADTSKNTAYLQMNSLRAEDTAVYYCSRWGGDGFYAMDYWGQGTLVTVSSGGGGSGGGGSGGGGSDIQMTQSPSSLSASVGDRVTITCRASQDVNTAVAWYQQKPGKAPKLLIYSASFLYSGVPSRFSGSRSGTDFTLTISSLQPEDFATYYCQQHYTTPPTFGQGTKVEIK

SEQ ID NO: 186 - protein, 214 aa, Homo sapiens
DIQMTQSPSSLSASVGDRVTITCKASQDVSIGVAWYQQKPGKAPKLLIYSASYRYTGVPSRFSGSGSGTDFTLTISSLQPEDFATYYCQQYYIYPYTFGQGTKVEIKRTVAAPSVFIFPPSDEQLKSGTASVVCLLNNFYPREAKVQWKVDNALQSGNSQESVTEQDSKDSTYSLSSTLTLSKADYEKHKVYACEVTHQGLSSPVTKSFNRGEC

SEQ ID NO: 187 - protein, 448 aa, Homo sapiens
EVQLVESGGGLVQPGGSLRLSCAASGFTFTDYTMDWVRQAPGKGLEWVADVNPNSGGSIYNQRFKGRFTLSVDRSKNTLYLQMNSLRAEDTAVYYCARNLGPSFYFDYWGQGTLVTVSSASTKGPSVFPLAPSSKSTSGGTAALGCLVKDYFPEPVTVSWNSGALTSGVHTFPAVLQSSGLYSLSSVVTVPSSSLGTQTYICNVNHKPSNTKVDKKVEPKSCDKTHTCPPCPAPELLGGPSVFLFPPKPKDTLMISRTPEVTCVVVDVSHEDPEVKFNWYVDGVEVHNAKTKPREEQYNSTYRVVSVLTVLHQDWLNGKEYKCKVSNKALPAPIEKTISKAKGQPREPQVYTLPPSREEMTKNQVSLTCLVKGFYPSDIAVEWESNGQPENNYKTTPPVLDSDGSFFLYSKLTVDKSRWQQGNVFSCSVMHEALHNHYTQKSLSLSPG

SEQ ID NO: 188 - protein, 107 aa, Homo sapiens [sequence omitted]

SEQ ID NO: 189 - protein, 119 aa, Homo sapiens [sequence omitted]

SEQ ID NO: 190 - protein, 11 aa, Homo sapiens
KASQDVSIGVA

SEQ ID NO: 191 - protein, 6 aa, Homo sapiens
SASYRY

SEQ ID NO: 192 - protein, 8 aa, Homo sapiens
QQYYIYPY

SEQ ID NO: 193 - protein, 10 aa, Homo sapiens
GFTFTDYTMD

SEQ ID NO: 194 - protein, 18 aa, Homo sapiens
ADVNPNSGGSIYNQRFKG

SEQ ID NO: 195 - protein, 12 aa, Homo sapiens
ARNLGPSFYFDY

SEQ ID NO: 196 - protein, 242 aa, Homo sapiens; identical to SEQ ID NO: 185

SEQ ID NO: 197 - protein, 15 aa, Homo sapiens
KASQSVDYDGDSYLN

SEQ ID NO: 198 - protein, 7 aa, Homo sapiens
DASNLVS

SEQ ID NO: 199 - protein, 9 aa, Homo sapiens
QQSTEDPWT

SEQ ID NO: 200 - protein, 5 aa, Homo sapiens
SYWMN

SEQ ID NO: 201 - protein, 17 aa, Homo sapiens
QIWPGDGDTNYNGKFKG

SEQ ID NO: 202 - protein, 15 aa, Homo sapiens
RETTTVGRYYYAMDY

SEQ ID NO: 203 - protein, 249 aa, Homo sapiens
DIQLTQSPASLAVSLGQRATISCKASQSVDYDGDSYLNWYQQIPGQPPKLLIYDASNLVSGIPPRFSGSGSGTDFTLNIHPVEKVDAATYHCQQSTEDPWTFGGGTKLEIKGGGGSGGGGSGGGGSQVQLQQSGAELVRPGSSVKISCKASGYAFSSYWMNWVKQRPGQGLEWIGQIWPGDGDTNYNGKFKGKATLTADESSSTAYMQLSSLASEDSAVYFCARRETTTVGRYYYAMDYWGQGTTVTVS

SEQ ID NO: 204 - protein, 217 aa, Homo sapiens
DIALTQPASVSGSPGQSITISCTGTSSDIGGYNSVSWYQQHPGKAPKLMIYGVNNRPSGVSNRFSGSKSGNTASLTISGLQAEDEADYYCSSYDIESATPVFGGGTKLTVLGQPKAAPSVTLFPPSSEELQANKATLVCLISDFYPGAVTVAWKGDSSPVKAGVETTTPSKQSNNKYAASSYLSLTPEQWKSHRSYSCQVTHEGSTVEKTVAPTESS

SEQ ID NO: 205 - protein, 450 aa, Homo sapiens
QVELVQSGAEVKKPGESLKISCKGSGYSFTSYWIGWVRQAPGKGLEWMGIIDPGDSRTRYSPSFQGQVTISADKSISTAYLQWSSLKASDTAMYYCARGQLYGGTYMDGWGQGTLVTVSSASTKGPSVFPLAPSSKSTSGGTAALGCLVKDYFPEPVTVSWNSGALTSGVHTFPAVLQSSGLYSLSSVVTVPSSSLGTQTYICNVNHKPSNTKVDKKVEPKSCDKTHTCPPCPAPELLGGPSVFLFPPKPKDTLMISRTPEVTCVVVDVSHEDPEVKFNWYVDGVEVHNAKTKPREEQYNSTYRVVSVLTVLHQDWLNGKEYKCKVSNKALPAPIEKTISKAKGQPREPQVYTLPPSRDELTKNQVSLTCLVKGFYPSDIAVEWESNGQPENNYKTTPPVLDSDGSFFLYSKLTVDKSRWQQGNVFSCSVMHEALHNHYTQKSLSLSPGK

SEQ ID NO: 206 - protein, 107 aa, Homo sapiens
DIALTQPASVSGSPGQSITISCTGTSSDIGGYNSVSWYQQHPGKAPKLMIYGVNNRPSGVSNRFSGSKSGNTASLTISGLQAEDEADYYCSSYDIESATPVFGGGTK

SEQ ID NO: 207 - protein, 120 aa, Homo sapiens
QVELVQSGAEVKKPGESLKISCKGSGYSFTSYWIGWVRQAPGKGLEWMGIIDPGDSRTRYSPSFQGQVTISADKSISTAYLQWSSLKASDTAMYYCARGQLYGGTYMDGWGQGTLVTVSS

SEQ ID NO: 208 - protein, 14 aa, Homo sapiens
TGTSSDIGGYNSVS

SEQ ID NO: 209 - protein, 11 aa, Homo sapiens
LMIYGVNNRPS

SEQ ID NO: 210 - protein, 10 aa, Homo sapiens
SSYDIESATP

SEQ ID NO: 211 - protein, 10 aa, Homo sapiens
GYSFTSYWIG

SEQ ID NO: 212 - protein, 16 aa, Homo sapiens
WMGIIDPGDSRTRYSP

SEQ ID NO: 213 - protein, 11 aa, Homo sapiens
GQLYGGTYMDG

SEQ ID NO: 214 - protein, 244 aa, Homo sapiens
QVQLQQSGAEVKKPGASVKVSCKASGYTFTGYYMHWVRQAPGQGLEWMGRINPNSGGTNYAQKFQGRVTMTRDTSISTAYMELSRLRSEDTAVYYCARGRYYGMDVWGQGTMVTVSSGGGGSGGGGSGGGGSGGGGSEIVLTQSPATLSLSPGERATISCRASQSVSSNFAWYQQRPGQAPRLLIYDASNRATGIPPRFSGSGSGTDFTLTISSLEPEDFAAYYCHQRSNWLYTFGQGTKVDIK

SEQ ID NO: 215 - protein, 253 aa, Homo sapiens
QVQLVQSGAEVKKPGASVKVSCKASGYTFTGYYMHWVRQAPGQGLEWMGWINPNSGGTNYAQKFQGRVTMTRDTSISTAYMELSRLRSDDTAVYYCARDLRRTVVTPRAYYGMDVWGQGTTVTVSSGGGGSGGGGSGGGGSGGGGSDIQLTQSPSTLSASVGDRVTITCQASQDISNSLNWYQQKAGKAPKLLIYDASTLETGVPSRFSGSGSGTDFSFTISSLQPEDIATYYCQQHDNLPLTFGQGTKVEIK

SEQ ID NO: 216 - protein, 217 aa, Homo sapiens
QSVLTQPPSASGTPGQRVTISCSGSSSNIGSNTVNWYQQLPGTAPKLLIFNYHQRPSGVPDRFSGSKSGSSASLAISGLQSEDEADYYCAAWDDSLNGWVFGGGTKLTVLGQPKAAPSVTLFPPSSEELQANKATLVCLISDFYPGAVTVAWKADSSPVKAGVETTTPDSKQSNNKYAASSYLSLTPEQWKSHRSYSCQVTHEGSTVEKTVAPTECS

SEQ ID NO: 217 - protein, 453 aa, Homo sapiens
EVQLVESGGGLVKPGGSLRLSCAASGFTFGDYALSWFRQAPGKGLEWVGVSRSKAYGGTTDYAASVKGRFTISRDDSKSTAYLQMNSLKTEDTAVYYCASSGYSSGWTPFDYWGQGTLVTVSSASTKGPSVFPLAPSSKSTSGGTAALGCLVKDYFPEPVTVSWNSGALTSGVHTFPAVLQSSGLYSLSSVVTVPSSSLGTQTYICNVNHKPSNTKVDKKVEPKSCDKTHTCPPCPAPELLGGPSVFLFPPKPKDTLMISRTPEVTCVVVDVSHEDPEVKFNWYVDGVEVHNAKTKPREEQYNSTYRVVSVLTVLHQDWLNGKEYKCKVSNKALPAPIEKTISKAKGQPREPQVYTLPPSREEMTKNQVSLTCLVKGFYPSDIAVEWESNGQPENNYKTTPPVLDSDGSFFLYSKLTVDKSRWQQGNVFSCSVMHEALHNHYTQKSLSLSPGK

SEQ ID NO: 218 - protein, 111 aa, Homo sapiens
QSVLTQPPSASGTPGQRVTISCSGSSSNIGSNTVNWYQQLPGTAPKLLIFNYHQRPSGVPDRFSGSKSGSSASLAISGLQSEDEADYYCAAWDDSLNGWVFGGGTKLTVLG

SEQ ID NO: 219 - protein, 131 aa, Homo sapiens
EVQLVESGGGLVKPGGSLRLSCAASGFTFGDYALSWFRQAPGKGLEWVGVSRSKAYGGTTDYAASVKGRFTISRDDSKSTAYLQMNSLKTEDTAVYYCASSGYSSGWTPFDYWGQGTLVTVSSASTKGPSV

SEQ ID NO: 220 - protein, 8 aa, Homo sapiens
SSNIGSNT

SEQ ID NO: 221 - protein, 11 aa, Homo sapiens
AAWDDSLNGWV

SEQ ID NO: 222 - protein, 8 aa, Homo sapiens
GFTFGDYA

SEQ ID NO: 223 - protein, 10 aa, Homo sapiens
SRSKAYGGTT

SEQ ID NO: 224 - protein, 14 aa, Homo sapiens
ASSGYSSGWTPFDY

SEQ ID NO: 225 - protein, 239 aa, Homo sapiens
QVQLVQSGAEVKKPGSSVKVSCKASGGTFSNYWMHWVRQAPGQGLEWMGATYRGHSDTYYNQKFKGRVTITADKSTSTAYMELSSLRSEDTAVYYCARGAIYNGYDVLDNWGQGTLVTVSSGGGGSGGGGSDIQMTQSPSSLSASVGDRVTITCSASQDISNYLNWYQQKPGKAPKLLIYYTSNLHSGVPSRFSGSGSGTDFTLTISSLQPEDFATYYCQQYRKLPWTFGQGTKLEIKR

SEQ ID NO: 226 - protein, 249 aa, Homo sapiens
DIQMTQSPSSLSASVGDRVTITCSASQDISNYLNWYQQKPGKAPKLLIYYTSNLHSGVPSRFSGSGSGTDFTLTISSLQPEDFATYYCQQYRKLPWTFGQGTKLEIKRGGGGSGGGGSGGGGSGGGGSQVQLVQSGAEVKKPGSSVKVSCKASGGTFSNYWMHWVRQAPGQGLEWMGATYRGHSDTYYNQKFKGRVTITADKSTSTAYMELSSLRSEDTAVYYCARGAIYNGYDVLDNWGQGTLVTVSS

SEQ ID NO: 227 - protein, 20 aa, Homo sapiens
VTSAPDTRPAPGSTAPPAHG

SEQ ID NO: 228 - protein, 43 aa, Homo sapiens
SNIKFRPGSVVVQLTLAFREGTINVHDVETQFNQYKTEAASRY

SEQ ID NO: 229 - protein, 35 aa, Homo sapiens
SVVVQLTLAFREGTINVHDVETQFNQYKTEAASRY

SEQ ID NO: 230 - protein, 20 aa, Homo sapiens
LAFREGTINVHDVETQFNQY

SEQ ID NO: 231 - protein, 25 aa, Homo sapiens
SNIKFRPGSVVVQLTLAAFREGTIN

SEQ ID NO: 232 - protein, 5 aa, Homo sapiens
RYGMS

SEQ ID NO: 233 - protein, 17 aa, Homo sapiens
TISGGGTYIYYPDSVKG

SEQ ID NO: 234 - protein, 13 aa, Homo sapiens
DNYGRNYDYGMDY

SEQ ID NO: 235 - protein, 10 aa, Homo sapiens
SATSSVSYIH

SEQ ID NO: 236 - protein, 7 aa, Homo sapiens
STSNLAS

SEQ ID NO: 237 - protein, 9 aa, Homo sapiens
QQRSSSPFT

SEQ ID NO: 238 - protein, 5 aa, Homo sapiens
GYAMS

SEQ ID NO: 239 - protein, 17 aa, Homo sapiens
TISSGGTYIYYPDSVKG

SEQ ID NO: 240 - protein, 12 aa, Homo sapiens
LGGDNYYEYFDV

SEQ ID NO: 241 - protein, 15 aa, Homo sapiens
RASKSVSTSGYSYMH

SEQ ID NO: 242 - protein, 7 aa, Homo sapiens
LASNLES

SEQ ID NO: 243 - protein, 9 aa, Homo sapiens
QHSRELPFT

SEQ ID NO: 244 - protein, 5 aa, Homo sapiens
DYAMN

SEQ ID NO: 245 - protein, 17 aa, Homo sapiens
VISTFSGNINFNQKFKG

SEQ ID NO: 246 - protein, 10 aa, Homo sapiens
SDYYGPYFDY

SEQ ID NO: 247 - protein, 16 aa, Homo sapiens
RSSQTIVHSNGNTYLE

SEQ ID NO: 248 - protein, 7 aa, Homo sapiens
KVSNRFS

SEQ ID NO: 249 - protein, 9 aa, Homo sapiens
FQGSHVPFT

SEQ ID NO: 250 - protein, 9 aa, Homo sapiens
LGGDNYYEY

SEQ ID NO: 251 - protein, 15 aa, Homo sapiens
TASKSVSTSGYSYMH

SEQ ID NO: 252 - protein, 7 aa, Homo sapiens
LVSNLES

SEQ ID NO: 253 - protein, 10 aa, Homo sapiens
QHIRELTRSE

SEQ ID NO: 254 - protein, 8 aa, Homo sapiens
GFTFSNYY

SEQ ID NO: 255 - protein, 8 aa, Homo sapiens
ISGRGSTI

SEQ ID NO: 256 - protein, 10 aa, Homo sapiens
VKDRGGYSPY

SEQ ID NO: 257 - protein, 6 aa, Homo sapiens
QSISTY

SEQ ID NO: 258 - protein, 10 aa, Homo sapiens
QQSYSTPPIT

SEQ ID NO: 259 - protein, 8 aa, Homo sapiens
GYTFTDYS

SEQ ID NO: 260 - protein, 8 aa, Homo sapiens
INTETGVP

SEQ ID NO: 261 - protein, 8 aa, Homo sapiens
ARRTGFDY

SEQ ID NO: 262 - protein, 11 aa, Homo sapiens
KNLLHSDGITY

SEQ ID NO: 263 - protein, 9 aa, Homo sapiens
VQVLELPFT

SEQ ID NO: 264 - protein, 8 aa, Homo sapiens
GFTFSSYA

SEQ ID NO: 265 - protein, 8 aa, Homo sapiens
ISDGGSYS

SEQ ID NO: 266 - protein, 14 aa, Homo sapiens
ARDSYYDNSYVRDY

SEQ ID NO: 267 - protein, 6 aa, Homo sapiens
QDINTF

SEQ ID NO: 268 - protein, 9 aa, Homo sapiens
LQYDEFPLT

SEQ ID NO: 269 - protein, 115 aa, Homo sapiens
MQEVTQIPAALSVPEGENLVLNCSFTDSAIYNLQWFRQDPGKGLTSLLLIQSSQREQTSGRLNASLDKSSGRSTLYIAASQPGDSATYLCAVRPTSGGSYIPTFGRGTSLIVHPY

SEQ ID NO: 270 - protein, 112 aa, Homo sapiens
MGVTQTPKFQVLKTGQSMTLQCAQDMNHEYMSWYRQDPGMGLRLIHYSVGAGITDQGEVPNGYNVSRSTTEDFPLRLLSAAPSQTSVYFCASSYVGNTGELFFGEGSRLTVL

SEQ ID NO: 271 - protein, 115 aa, Homo sapiens
MQEVTQIPAALSVPEGENLVLNCSFTDSAIYNLQWFRQDPGKGLTSLLLIMSHQREQTSGRLNASLDKSSGRSTLYIAASQPGDSATYLCAVRPTSGGSYIPTFGRGTSLIVHPY

SEQ ID NO: 272 - protein, 112 aa, Homo sapiens
MGVTQTPKFQVLKTGQSMTLQCAQDMNHEYMSWYRQDPGMGLRLIHYSVSAGITDQGEVPNGYNVSRSTTEDFPLRLLSAAPSQTSVYFCASSYVGNTGELFFGEGSRLTVL

SEQ ID NO: 273 - protein, 9 aa, Human papillomavirus type 1a
YIIFVYIPL

SEQ ID NO: 274 - protein, 9 aa, Human papillomavirus type 1a
KLPQLCTEL

SEQ ID NO: 275 - protein, 10 aa, Human papillomavirus type 1a
TIHEIILECV

SEQ ID NO: 276 - protein, 9 aa, Human papillomavirus type 1a
YMLDLQPET

SEQ ID NO: 277 - protein, 8 aa, Human papillomavirus type 1a
TLGIVCPI

SEQ ID NO: 278 - protein, 9 aa, Human papillomavirus type 1a
KCIDFYSRI

SEQ ID NO: 279 - protein, 9 aa, Human papillomavirus type 1a
FQQLFLNTL

SEQ ID NO: 280 - protein, 132 aa, Homo sapiens
METLLGLLILQLQLQWVSSKQEVTQIPAALSVPEGENLVLNCSFTDSAIYNLQWFRQDPGKGLTSLLLIQSSQREQTSGRLNASLDKSSGRSTLYIAASQPGDSATYLCAVRETSGSRLTFGEGTQLTVNPD

SEQ ID NO: 281 - protein, 133 aa, Homo sapiens
MGIRLLCRVAFCFLAVGLVDVKVTQSSRYLVKRTGEKVFLECVQDMDHENMFWYRQDPGLGLRLIYFSYDVKMKEKGDIPEGYSVSREKKERFSLILESASTNQTSMYLCASSFWGRSTDTQYFGPGTRLTVL

SEQ ID NO: 282 - protein, 9 aa, Homo sapiens
GILGFVFTL

SEQ ID NO: 283 - protein, 9 aa, Homo sapiens
HPVGEADYF

SEQ ID NO: 284 - protein, 9 aa, Homo sapiens
AITRKMAAT

SEQ ID NO: 285 - protein, 9 aa, Homo sapiens
AYTKKAPQL

SEQ ID NO: 286 - protein, 9 aa, Homo sapiens
LLNQHACAV

SEQ ID NO: 287 - protein, 9 aa, Homo sapiens
KLVLDVAHV

SEQ ID NO: 288 - protein, 9 aa, Homo sapiens
FMNKFIYEI

SEQ ID NO: 289 - protein, 9 aa, Homo sapiens
SIPLFQVPE

SEQ ID NO: 290 - protein, 9 aa, Homo sapiens
LLNFTESRT

SEQ ID NO: 291 - protein, 9 aa, Homo sapiens
FVQEATYKF

SEQ ID NO: 292 - protein, 9 aa, Homo sapiens
ATYKEVSKM

SEQ ID NO: 293 - protein, 9 aa, Homo sapiens
KEVSKMVKD

SEQ ID NO: 294 - protein, 9 aa, Homo sapiens
RHNCFLAHK

SEQ ID NO: 295 - protein, 9 aa, Homo sapiens
ATAATCCQL

SEQ ID NO: 296 - protein, 9 aa, Homo sapiens
YIQESQALA

SEQ ID NO: 297 - protein, 10 aa, Homo sapiens
QLTSSELMAI

SEQ ID NO: 298 - protein, 9 aa, Homo sapiens
KLSQKFTKV

SEQ ID NO: 299 - protein, 9 aa, Homo sapiens
KELRESSLL

SEQ ID NO: 300 - protein, 9 aa, Homo sapiens
SLVVDETYV

SEQ ID NO: 301 - protein, 9 aa, Homo sapiens
ILLWAARYD

SEQ ID NO: 302 - protein, 9 aa, Homo sapiens
KIIPSCCKA

SEQ ID NO: 303 - protein, 9 aa, Homo sapiens
CRGDVLDCL

SEQ ID NO: 304 - protein, 9 aa, Homo sapiens
QQDTLSNKI

SEQ ID NO: 305 - protein, 10 aa, Homo sapiens
TMKQEFLINL

SEQ ID NO: 306 - protein, 9 aa, Homo sapiens
NLVKQKPQI

SEQ ID NO: 307 - protein, 9 aa, Homo sapiens
AVIADFSGL

SEQ ID NO: 308 - protein, 9 aa, Homo sapiens
LLACGEGAA

SEQ ID NO: 309 - protein, 9 aa, Homo sapiens
LACGEGAAD

SEQ ID NO: 310 - protein, 10 aa, Homo sapiens
KAPQLTSSEL

SEQ ID NO: 311 - protein, 9 aa, Homo sapiens
YICSQQDTL

SEQ ID NO: 312 - protein, 9 aa, Homo sapiens
TECCKLTTL

SEQ ID NO: 313 - protein, 10 aa, Homo sapiens
CTAEISLADL

SEQ ID NO: 314 - protein, 10 aa, Homo sapiens
VTKELRESSL

SEQ ID NO: 315 - protein, 10 aa, Homo sapiens
IMSYICSQQD

SEQ ID NO: 316 - protein, 9 aa, Homo sapiens
TRTFQAITV

SEQ ID NO: 317 - protein, 9 aa, Homo sapiens
FQKLGEYYL

SEQ ID NO: 318 - protein, 9 aa, Homo sapiens
RVAKGYQEL

SEQ ID NO: 319 - protein, 10 aa, Homo sapiens
SYQCTAEISL

SEQ ID NO: 320 - protein, 9 aa, Homo sapiens
KQEFLINLV

SEQ ID NO: 321 - protein, 9 aa, Homo sapiens
MKWVESIFL

SEQ ID NO: 322 - protein, 9 aa, Homo sapiens
PVNPGVGQC

SEQ ID NO: 323 - protein, 9 aa, Homo sapiens
AADIIIGHL

SEQ ID NO: 324 - protein, 9 aa, Homo sapiens
QVPEPVTSC

SEQ ID NO: 325 - protein, 10 aa, Homo sapiens
TTLERGQCII

SEQ ID NO: 326 - protein, 9 aa, Homo sapiens
KMAATAATC

SEQ ID NO: 327 - protein, 10 aa, Homo sapiens
QAQGVALQTM

SEQ ID NO: 328 - protein, 9 aa, Homo sapiens
FQAITVTKL

SEQ ID NO: 329 - protein, 9 aa, Homo sapiens
LLEKCFQTE

SEQ ID NO: 330 - protein, 9 aa, Homo sapiens
VAYTKKAPQ

SEQ ID NO: 331 - protein, 9 aa, Homo sapiens
KYIQESQAL

SEQ ID NO: 332 - protein, 9 aa, Homo sapiens
GVALQTMKQ

SEQ ID NO: 333 - protein, 9 aa, Homo sapiens
GQEQEVCFA

SEQ ID NO: 334 - protein, 10 aa, Homo sapiens
SEEGRHNCFL

SEQ ID NO: 335 - protein, 10 aa, Homo sapiens
RHPFLYAPTI

SEQ ID NO: 336 - protein, 10 aa, Homo sapiens
TEIQKLVLDV

SEQ ID NO: 337 - protein, 10 aa, Homo sapiens
RRHPQLAVSV

SEQ ID NO: 338 - protein, 10 aa, Homo sapiens
GEYYLQNAFL

SEQ ID NO: 339 - protein, 10 aa, Homo sapiens
NRRPCFSSLV

SEQ ID NO: 340 - protein, 10 aa, Homo sapiens
LQTMKQEFLI

SEQ ID NO: 341 - protein, 10 aa, Homo sapiens
IADFSGLLEK

SEQ ID NO: 342 - protein, 10 aa, Homo sapiens
GLLEKCCQGQ

SEQ ID NO: 343 - protein, 9 aa, Homo sapiens
TLSNKITEC

SEQ ID NO: 344 - protein, 10 aa, Homo sapiens
LQDGEKIMSY

SEQ ID NO: 345 - protein, 9 aa, Homo sapiens
GLFQKLGBY

SEQ ID NO: 346 - protein, 10 aa, Homo sapiens
NEYGIASILD

SEQ ID NO: 347 - protein, 10 aa, Homo sapiens
KMVKDALTAI

SEQ ID NO: 348 - protein, 9 aa, Homo sapiens
FLASFVHEY

SEQ ID NO: 349 - protein, 9 aa, Homo sapiens
AQFVQEATY

SEQ ID NO: 350 - protein, 9 aa, Homo sapiens
EYSRRHPQL

SEQ ID NO: 351 - protein, 9 aa, Homo sapiens
AYEEDRETF

SEQ ID NO: 352 - protein, 9 aa, Homo sapiens
SYANRRPCF

SEQ ID NO: 353 - protein, 9 aa, Homo sapiens
CFAEEGQKL

SEQ ID NO: 354 - protein, 9 aa, Homo sapiens
RSCGLFQKL

SEQ ID NO: 355 - protein, 9 aa, Homo sapiens
IFLIFLLNF

SEQ ID NO: 356 - protein, 9 aa, Homo sapiens
KPEGLSPNL

SEQ ID NO: 357 - protein, 10 aa, Homo sapiens
GLSPNLNRFL

SEQ ID NO: 358 - protein, 9 aa, Homo sapiens
EYYLQNAFL

SEQ ID NO: 359 - protein, 9 aa, Homo sapiens
NLMNLGATL

SEQ ID NO: 360 - protein, 9 aa, Homo sapiens
NYMNLGATL

SEQ ID NO: 361 - protein, 15 aa, Homo sapiens
CMTWNQMNLGATLKG

SEQ ID NO: 362 - protein, 15 aa, Homo sapiens
WNQMNLGATLKGVAA

SEQ ID NO: 363 - protein, 15 aa, Homo sapiens
CMTWNYMNLGATLKG

SEQ ID NO: 364 - protein, 15 aa, Homo sapiens
WNYMNLGATLKGVAA

SEQ ID NO: 365 - protein, 14 aa, Homo sapiens
TWNQMNLGATLKGV

SEQ ID NO: 366 - protein, 15 aa, Homo sapiens
TWNQMNLGATLKGVA

SEQ ID NO: 367 - protein, 15 aa, Homo sapiens
CMTWNLMNLGATLKG

SEQ ID NO: 368 - protein, 15 aa, Homo sapiens
MTWNLMNLGATLKGV

SEQ ID NO: 369 - protein, 15 aa, Homo sapiens
TWNLMNLGATLKGVA

SEQ ID NO: 370 - protein, 15 aa, Homo sapiens
WNLMNLGATLKGVAA

SEQ ID NO: 371 - protein, 8 aa, Homo sapiens
MNLGATLK

SEQ ID NO: 372 - protein, 15 aa, Homo sapiens
MTWNYMNLGATLKGV

SEQ ID NO: 373 - protein, 15 aa, Homo sapiens
TWNYMNLGATLKGVA

SEQ ID NO: 374 - protein, 17 aa, Homo sapiens
CMTWNQMNLGATLKGVA

SEQ ID NO: 375 - protein, 17 aa, Homo sapiens
CMTWNLMNLGATLKGVA

SEQ ID NO: 376 - protein, 17 aa, Homo sapiens
CMTWNYMNLGATLKGVA

SEQ ID NO: 377 - protein, 9 aa, Homo sapiens
GYLRNPTAC

SEQ ID NO: 378 - protein, 9 aa, Homo sapiens
GALRNPTAL

SEQ ID NO: 379 - protein, 9 aa, Homo sapiens
YALRNPTAC

SEQ ID NO: 380 - protein, 9 aa, Homo sapiens
GLLRNPTAC

SEQ ID NO: 381 - protein, 9 aa, Homo sapiens
RYRPHPGAL

SEQ ID NO: 382 - protein, 9 aa, Homo sapiens
YQRPHPGAL

SEQ ID NO: 383 - protein, 9 aa, Homo sapiens
RLRPHPGAL

SEQ ID NO: 384 - protein, 9 aa, Homo sapiens
RIRPHPGAL

SEQ ID NO: 385 - protein, 15 aa, Homo sapiens
QFPNHSFKHEDPMGQ

SEQ ID NO: 386 - protein, 9 aa, Homo sapiens
HSFKHEDPY

SEQ ID NO: 387 - protein, 13 aa, Homo sapiens
QFPNHSFKHEDPM

SEQ ID NO: 388 - protein, 13 aa, Homo sapiens
QFPNHSFKHEDPY

SEQ ID NO: 389 - protein, 13 aa, Homo sapiens
KRPFMCAYPGCNK

SEQ ID NO: 390 - protein, 13 aa, Homo sapiens
KRPFMCAYPGCYK

SEQ ID NO: 391 - protein, 9 aa, Homo sapiens
FMCAYPGCY

SEQ ID NO: 392 - protein, 9 aa, Homo sapiens
FMCAYPGCK

SEQ ID NO: 393 - protein, 15 aa, Homo sapiens
KRPFMCAYPGCNKRY

SEQ ID NO: 394 - protein, 15 aa, Homo sapiens
SEKRPFMCAYPGCNK

SEQ ID NO: 395 - protein, 15 aa, Homo sapiens
KRPFMCAYPGCYKRY

SEQ ID NO: 396 - protein, 9 aa, Homo sapiens
VLDFAPPGA

SEQ ID NO: 397 - protein, 9 aa, Homo sapiens
RMFPNAPYL

SEQ ID NO: 398 - protein, 9 aa, Homo sapiens
YMFPNAPYL

SEQ ID NO: 399 - protein, 9 aa, Homo sapiens
SLGEQQYSV

SEQ ID NO: 400 - protein, 9 aa, Homo sapiens
CYTWNQMNL

SEQ ID NO: 401 - protein, 9 aa, Homo sapiens
CMTWNQMNL

SEQ ID NO: 402 - protein, 9 aa, Homo sapiens
NQMNLGATL

SEQ ID NO: 403 - protein, 8 aa, Homo sapiens
CMTWNQMN

SEQ ID NO: 404 - protein, 9 aa, Human papillomavirus type 1a
LQTTIHDII

SEQ ID NO: 405 - protein, 9 aa, Human papillomavirus type 1a
VYDFAFRDL

SEQ ID NO: 406 - protein, 9 aa, Human papillomavirus type 1a
FAFRDLCIV

SEQ ID NO: 407 - protein, 9 aa, Human papillomavirus type 1a
KFYSKISEY

SEQ ID NO: 408 - protein, 9 aa, Human papillomavirus type 1a
ISEYRHYCY

SEQ ID NO: 409 - protein, 9 aa, Human papillomavirus type 1a
TLHEYMLDL

SEQ ID NO: 410 - protein, 9 aa, Human papillomavirus type 1a
QAEPDRAHY

SEQ ID NO: 411 - protein, 9 aa, Human papillomavirus type 1a
RAHYNIVTF

SEQ ID NO: 412 - protein, 9 aa, Human papillomavirus type 1a
CDSTLRLCV

SEQ ID NO: 413 - protein, 10 aa, Human papillomavirus type 1a
LCVQSTHVDI

SEQ ID NO: 414 - protein, 9 aa, Human papillomavirus type 1a
LLMGTLGIV

SEQ ID NO: 415 - protein, 12 aa, Human papillomavirus type 1a
LLMGTLGIVCPI

SEQ ID NO: 416 - protein, 10 aa, Human papillomavirus type 1a
YMLDLQPETT

SEQ ID NO: 417 - protein, 9 aa, Human papillomavirus type 1a
CYSLYGTTL

SEQ ID NO: 418 - protein, 9 aa, Human papillomavirus type 1a
EYRHYCYSL

SEQ ID NO: 419 - protein, 9 aa, Human papillomavirus type 1a
DPQERPRKL

SEQ ID NO: 420 - protein, 9 aa, Human papillomavirus type 1a
HYCYSLYGT

SEQ ID NO: 421 - protein, 9 aa, Human papillomavirus type 1a
DFAFRDLCI

SEQ ID NO: 422 - protein, 10 aa, Human papillomavirus type 1a
LYGTTLEQQY

SEQ ID NO: 423 - protein, 10 aa, Human papillomavirus type 1a
HYCYSLYGTT

SEQ ID NO: 424 - protein, 10 aa, Human papillomavirus type 1a
EVYDFAFRDL

SEQ ID NO: 425 - protein, 10 aa, Human papillomavirus type 1a
EYRHYCYSLY

SEQ ID NO: 426 - protein, 10 aa, Human papillomavirus type 1a
VYDFAFRDLC

SEQ ID NO: 427 - protein, 10 aa, Human papillomavirus type 1a
YCYSIYGTTL

SEQ ID NO: 428 - protein, 9 aa, Human papillomavirus type 1a
VYCKTVLEL

SEQ ID NO: 429 - protein, 9 aa, Human papillomavirus type 1a
VYGDTLEKL

SEQ ID NO: 430 - protein, 10 aa, Human papillomavirus type 1a
LTNTGLYNLL

SEQ ID NO: 431 - protein, 9 aa, Human papillomavirus type 1a
DLQPETTDL

SEQ ID NO: 432 - protein, 9 aa, Human papillomavirus type 1a
TPTLHEYML

SEQ ID NO: 433 - protein, 9 aa, Human papillomavirus type 1a
GTLGIVCPI

SEQ ID NO: 434 - protein, 9 aa, Human papillomavirus type 1a
EPDRAHYNI

SEQ ID NO: 435 - protein, 9 aa, Human papillomavirus type 1a
QLFLNTLSF

SEQ ID NO: 436 - protein, 10 aa, Human papillomavirus type 1a
AFQQLFLNTL

SEQ ID NO: 437 - protein, 10 aa, Hepatitis B virus
FLPSDFFPSV

SEQ ID NO: 438 - protein, 10 aa, Hepatitis B virus
GLSRYVARLG

SEQ ID NO: 439 - protein, 9 aa, Hepatitis B virus
KLHLYSHPI

SEQ ID NO: 440 - protein, 9 aa, Hepatitis B virus
FLLSLGIHL

SEQ ID NO: 441 - protein, 9 aa, Hepatitis B virus
ALMPLYACI

SEQ ID NO: 442 - protein, 9 aa, Hepatitis B virus
SLYADSPSV

SEQ ID NO: 443 - protein, 9 aa, Hepatitis B virus
STLPETTVV

SEQ ID NO: 444 - protein, 10 aa, Hepatitis B virus
LIMPARFYPK

SEQ ID NO: 445 - protein, 10 aa, Hepatitis B virus
AIMPARFYPK

SEQ ID NO: 446 - protein, 9 aa, Hepatitis B virus
YVNVNMGLK

SEQ ID NO: 447 - protein, 15 aa, Hepatitis B virus
MQWNSTALHQALQDP

SEQ ID NO: 448 - protein, 9 aa, Hepatitis B virus
LLDPRVRGL

SEQ ID NO: 449 - protein, 10 aa, Hepatitis B virus
SILSKTGDPV

SEQ ID NO: 450 - protein, 9 aa, Hepatitis B virus
VLQAGFFLL

SEQ ID NO: 451 - protein, 9 aa, Hepatitis B virus
FLLTRILTI

SEQ ID NO: 452 - protein, 9 aa, Hepatitis B virus
FLGGTPVCL

SEQ ID NO: 453 - protein, 9 aa, Hepatitis B virus
LLCLIFLLV

SEQ ID NO: 454 - protein, 10 aa, Hepatitis B virus
LVLLDYQGML

SEQ ID NO: 455 - protein, 10 aa, Hepatitis B virus
LLDYQGMLPV

SEQ ID NO: 456 - protein, 9 aa, Hepatitis B virus
IPIPSSWAF

SEQ ID NO: 457 - protein, 9 aa, Hepatitis B virus
WLSLLVPFV

SEQ ID NO: 458 - protein, 10 aa, Hepatitis B virus
GLSPTVWLSV

SEQ ID NO: 459 - protein, 10 aa, Hepatitis B virus
SIVSPFIPLL

SEQ ID NO: 460 - protein, 9 aa, Hepatitis B virus
ILSPFLPLL

SEQ ID NO: 461 - protein, 17 aa, Hepatitis B virus
ATVELLSFLPSDFFPSV

SEQ ID NO: 462 - protein, 9 aa, Hepatitis B virus
LPSDFFPSV

SEQ ID NO: 463 - protein, 9 aa, Hepatitis B virus
CLTFGRETV

SEQ ID NO: 464 - protein, 10 aa, Hepatitis B virus
VLEYLVSFGV

SEQ ID NO: 465 - protein, 9 aa, Hepatitis B virus
EYLVSFGVW

SEQ ID NO: 466 - protein, 10 aa, Hepatitis B virus
ILSTLPETTV

SEQ ID NO: 467 - protein, 11 aa, Hepatitis B virus
STLPETTVVRR

SEQ ID NO: 468 - protein, 9 aa, Hepatitis B virus
NVSIPWTHK

SEQ ID NO: 469 - protein, 9 aa, Hepatitis B virus
KVGNFTGLY

SEQ ID NO: 470 - protein, 9 aa, Hepatitis B virus
GLYSSTVPV

SEQ ID NO: 471 - protein, 10 aa, Hepatitis B virus
TLWKAGILYK

SEQ ID NO: 472 - protein, 10 aa, Hepatitis B virus
TPARVTGGVF

SEQ ID NO: 473 - protein, 10 aa, Hepatitis B virus
LVVDFSQFSR

SEQ ID NO: 474 - protein, 9 aa, Hepatitis B virus
GLSRYVARL

SEQ ID NO: 475 - protein, 9 aa, Hepatitis B virus
SIACSVVRR

SEQ ID NO: 476 - protein, 9 aa, Hepatitis B virus
YMDDVVLGA

SEQ ID NO: 477 - protein, 8 aa, Hepatitis B virus
PLGFFPDH

SEQ ID NO: 478 - protein, 10 aa, Hepatitis B virus
QAFTFSPTYK

SEQ ID NO: 479 - protein, 9 aa, Hepatitis B virus
KYTSFPWLL

SEQ ID NO: 480 - protein, 10 aa, Hepatitis B virus
ILRGTSFVYV

SEQ ID NO: 481 - protein, 9 aa, Hepatitis B virus
HLSLRGLFV

SEQ ID NO: 482 - protein, 9 aa, Hepatitis B virus
VLHKRTLGL

SEQ ID NO: 483 - protein, 10 aa, Hepatitis B virus
GLSAMSTTDL

SEQ ID NO: 484 - protein, 9 aa, Hepatitis B virus
CLFKDWEEL

SEQ ID NO: 485 - protein, 9 aa, Hepatitis B virus
VLGGCRHKL

SEQ ID NO: 486 - protein, 561 aa, Artificial Sequence
  CMV pp65 amino acid sequence
MESRGRRCPEMISVLGPISGHVLKAVFSRGDTPVLPHETRLLQTGIHVRVSQPSLILVSQYTPDSTPCHRGDNQLQVQHTYFTGSEVENVSVNVHNPTGRSICPSQEPMSIYVYALPLKMLNIPSINVHHYPSAAERKHRHLPVADAVIHASGKQMWQARLTVSGLAWTRQQNQWKEPDVYYTSAFVFPTKDVALRHVVCAHELVCSMENTRATKMQVIGDQYVKVYLESFCEDVPSGKLFMHVTLGSDVEEDLTMTRNPQPFMRPHERNGFTVLCPKNMIIKPGKISHIMLDVAFTSHEHFGLLCPKSIPGLSISGNLLMNGQQIFLEVQAIRETVELRQYDPVAALFFFDIDLLLQRGPQYSEHPTFTSQYRIQGKLEYRHTWDRHDEGAAQGDDDVWTSGSDSDEELVTTERKTPRVTGGGAMAGASTSAGRKRKSASSATACTSGVMTRGRLKAESTVAPEEDTDEDSDNEIHNPAVFTWPPWQAGILARNLVPMVATVQGQNLKYQEFFWDANDIYRIFAELEGVWQPAAQPKRRRHRQDALPGPCIASTPKKHRG

SEQ ID NO: 487 - protein, 9 aa, Artificial Sequence
  CMV peptide epitope
NLVPMVATV

SEQ ID NO: 488 - protein, 906 aa, Artificial Sequence
  CMV gB amino acid sequence
MESRIWCLVVCVNLCIVCLGAAVSSSSTSHATSSTHNGSHTSRTTSAQTRSVYSQHVTSSEAVSHRANETIYNTTLKYGDVVGVNTTKYPYRVCSMAQGTDLIRFERNIICTSMKPINEDLDEGIMVVYKRNIVAHTFKVRVYQKVLTFRRSYAYIYTTYLLGSNTEYVAPPMWEIHHINKFAQCYSSYSRVIGGTVFVAYHRDSYENKTMQLIPDDYSNTHSTRYVTVKDQWHSRGSTWLYRETCNLNCMLTITTARSKYPYHFFATSTGDVVYISPFYNGTNRNASYFGENADKFFIFPNYTIVSDFGRPNAAPETHRLVAFLERADSVISWDIQDEKNVTCQLTFWEASERTIRSEAEDSYHFSSAKMTATFLSKKQEVNMSDSALDCVRDEAINKLQQIFNTSYNQTYEKYGNVSVFETSGGLVVFWQGIKQKSLVELERLANRSSLNITHRTRRSTSDNNTTHLSSMESVHNLVYAQLQFTYDTLRGYINRALAQIAEAWCVDQRRTLEVFKELSKINPSAILSAIYNKPIAARFMGDVLGLASCVTINQTSVKVLRDMNVKESPGRCYSRPVVIFNFANSSYVQYGQLGEDNEILLGNHRTEECQLPSLKIFIAGNSAYEYVDYLFKRMIDLSSISTVDSMIALDIDPLENTDFRVLELYSQKELRSSNVFDLEEIMREFNSYKQRVKYVEDKVVDPLPPYLKGLDDLMSGLGAAGKAVGVAIGAVGGAVASVVEGVATFLKNPFGAFTIILVAIAVVIITYLIYTRQRRLCTQPLQNLFPYLVSADGTTVTSGSTKDTSLQAPPSYEESVYNSGRKGPGPPSSDASTAAPPYTNEQAYQMLLALARLDAEQRAQQNGTDSLDGQTGTQDKGQKPNLLDRLRHRKNGYRHLKDSDEEENV

SEQ ID NO: 489 - protein, 5 aa, Artificial Sequence
  linker
GSGGG

SEQ ID NO: 490 - protein, 5 aa, Artificial Sequence
  Linker
GGGSG

SEQ ID NO: 491 - protein, 5 aa, Artificial Sequence
  Linker
GSSSG

SEQ ID NO: 492 - protein, 5 aa, Artificial Sequence
  Linker
GGGGS

SEQ ID NO: 493 - protein, 813 aa, Artificial Sequence
  Construct
APTSSSTKKTQLQLEALLLDLQMILNGINNYKNPKLTRMLTAKFYMPKKATELKHLQCLEEELKPLEEVLNLAQSKNFHLRPRDLISNINVIVLELKGSETTFMCEYADETATIVEFLNRWITFCQSIISTLTGGGGSGGGGSGGGGSGGGGSAPTSSSTKKTQLQLEALLLDLQMILNGINNYKNPKLTRMLTAKFYMPKKATELKHLQCLEEELKPLEEVLNLAQSKNFHLRPRDLISNINVIVLELKGSETTFMCEYADETATIVEFLNRWITFCQSIISTLTGGGGSGGGGSGGGGSGGGGSGSHSMRYFFTSVSRPGRGEPRFIAVGYVDDTQFVRFDSDAASQRMEPRAPWIEQEGPEYWDGETRKVKAHSQTHRVDLGTLRGCYNQSEAGSHTVQRMYGCDVGSDWRFLRGYHQYAYDGKDYIALKEDLRSWTAADMCAQTTKHKWEAAHVAEQLRAYLEGTCVEWLRRYLENGKETLQRTDAPKTHMTHHAVSDHEATLRCWALSFYPAEITLTWQRDGEDQTQDTELVETRPCGDGTFQKWAAVVVPSGQEQRYTCHVQHEGLPKPLTLRWEAAAGGDKTHTCPPCPAPEAAGGPSVFLFPPKPKDTLMISRTPEVTCVVVDVSHEDPEVKFNWYVDGVEVHNAKTKPREEQYNSTYRVVSVLTVLHQDWLNGKEYKCKVSNKALPAPIEKTISKAKGQPREPQVYTLPPSREEMTKNQVSLTCLVKGFYPSDIAVEWESNGQPENNYKTTPPVLDSDGSFFLYSKLTVDKSRWQQGNVFSCSVMHEALHNHYTQKSLSLSPGK

SEQ ID NO: 494 - protein, 813 aa, Artificial Sequence
  Construct
APTSSSTKKTQLQLEALLLDLQMILNGINNYKNPKLTRMLTAKFYMPKKATELKHLQCLEEELKPLEEVLNLAQSKNFHLRPRDLISNINVIVLELKGSETTFMCEYADETATIVEFLNRWITFCQSIISTLTGGGGSGGGGSGGGGSGGGGSAPTSSSTKKTQLQLEALLLDLQMILNGINNYKNPKLTRMLTAKFYMPKKATELKHLQCLEEELKPLEEVLNLAQSKNFHLRPRDLISNINVIVLELKGSETTFMCEYADETATIVEFLNRWITFCQSIISTLTGGGGSGGGGSGGGGSGGGGSGSHSMRYFFTSVSRPGRGEPRFIAVGYVDDTQFVRFDSDAASQRMEPRAPWIEQEGPEYWDGETRKVKAHSQTHRVDLGTLRGYCNQSEAGSHTVQRMYGCDVGSDWRFLRGYHQYAYDGKDYIALKEDLRSWTAACMAAQTTKHKWEAAHVAEQLRAYLEGTCVEWLRRYLENGKETLQRTDAPKTHMTHHAVSDHEATLRCWALSFYPAEITLTWQRDGEDQTQDTELVETRPCGDGTFQKWAAVVVPSGQEQRYTCHVQHEGLPKPLTLRWEAAAGGDKTHTCPPCPAPEAAGGPSVFLFPPKPKDTLMISRTPEVTCVVVDVSHEDPEVKFNWYVDGVEVHNAKTKPREEQYNSTYRVVSVLTVLHQDWLNGKEYKCKVSNKALPAPIEKTISKAKGQPREPQVYTLPPSREEMTKNQVSLTCLVKGFYPSDIAVEWESNGQPENNYKTTPPVLDSDGSFFLYSKLTVDKSRWQQGNVFSCSVMHEALHNHYTQKSLSLSPGK

SEQ ID NO: 495 - protein, 99 aa, Artificial Sequence
  Construct
IQRTPKIQVYSCHPAENGKSNFLNCYVSGFHPSDIEVDLLKNGCRIEKVEHSDLSFSKDWSFYLLYYTEFTPTEKDEYACRVNHVTLSQPKIVKWDRDM

SEQ ID NO: 496 - protein, 926 aa, Artificial Sequence
  Construct
APTSSSTKKTQLQLEALLLDLQMILNGINNYKNPKLTRMLTAKFYMPKKATELKHLQCLEEELKPLEEVLNLAQSKNFHLRPRDLISNINVIVLELKGSETTFMCEYADETATIVEFLNRWITFCQSIISTLTGGGGSGGGGSGGGGSGGGGSAPTSSSTKKTQLQLEALLLDLQMILNGINNYKNPKLTRMLTAKFYMPKKATELKHLQCLEEELKPLEEVLNLAQSKNFHLRPRDLISNINVIVLELKGSETTFMCEYADETATIVEFLNRWITFCQSIISTLTGGGGSGGGGSGGGGSGGGGSIQRTPKIQVYSRHPAENGKSNFLNCYVSGFHPSDIEVDLLKNGCRIEKVEHSDLSFSKDWSFYLLYYTEFTPTEKDEYACRVNHVTLSQPKIVKWDRDMGGGGSGGGGSGGGGSGSHSMRYFFTSVSRPGRGEPRFIAVGYVDDTQFVRFDSDAASQRMEPRAPWIEQEGPEYWDGETRKVKAHSQTHRVDLGTLRGCYNQSEAGSHTVQRMYGCDVGSDWRFLRGYHQYAYDGKDYIALKEDLRSWTAADMCAQTTKHKWEAAHVAEQLRAYLEGTCVEWLRRYLENGKETLQRTDAPKTHMTHHAVSDHEATLRCWALSFYPAEITLTWQRDGEDQTQDTELVETRPAGDGTFQKWAAVVVPSGQEQRYTCHVQHEGLPKPLTLRWEAAAGGDKTHTCPPCPAPEAAGGPSVFLFPPKPKDTLMISRTPEVTCVVVDVSHEDPEVKFNWYVDGVEVHNAKTKPREEQYNSTYRVVSVLTVLHQDWLNGKEYKCKVSNKALPAPIEKTISKAKGQPREPQVYTLPPSREEMTKNQVSLTCLVKGFYPSDIAVEWESNGQPENNYKTTPPVLDSDGSFFLYSKLTVDKSRWQQGNVFSCSVMHEALHNHYTQKSLSLSPG

SEQ ID NO: 497 - protein, 123 aa, Artificial Sequence
  Construct
NLVPMVATVGGGASGGGGSGGGGSIQRTPKIQVYSCHPAENGKSNFLNCYVSGFHPSDIEVDLLKNGERIEKVEHSDLSFSKDWSFYLLYYTEFTPTEKDEYACRVNHVTLSQPKIVKWDRDM

SEQ ID NO: 498 - protein, 773 aa, Artificial Sequence
  Construct
APTSSSTKKTQLQLEALLLDLQMILNGINNYKNPKLTRMLTAKFYMPKKATELKHLQCLEEELKPLEEVLNLAQSKNFHLRPRDLISNINVIVLELKGSETTFMCEYADETATIVEFLNRWITFCQSIISTLTGGGGSGGGGSGGGGSGGGGSIQRTPKIQVYSRHPAENGKSNFLNCYVSGFHPSDIEVDLLKNGCRIEKVEHSDLSFSKDWSFYLLYYTEFTPTEKDEYACRVNHVTLSQPKIVKWDRDMGGGGSGGGGSGGGGSGSHSMRYFFTSVSRPGRGEPRFIAVGYVDDTQFVRFDSDAASQRMEPRAPWIEQEGPEYWDGETRKVKAHSQTHRVDLGTLRGCYNQSEAGSHTVQRMYGCDVGSDWRFLRGYHQYAYDGKDYIALKEDLRSWTAADMCAQTTKHKWEAAHVAEQLRAYLEGTCVEWLRRYLENGKETLQRTDAPKTHMTHHAVSDHEATLRCWALSFYPAEITLTWQRDGEDQTQDTELVETRPAGDGTFQKWAAVVVPSGQEQRYTCHVQHEGLPKPLTLRWEAAAGGDKTHTCPPCPAPEAAGGPSVFLFPPKPKDTLMISRTPEVTCVVVDVSHEDPEVKFNWYVDGVEVHNAKTKPREEQYNSTYRVVSVLTVLHQDWLNGKEYKCKVSNKALPAPIEKTISKAKGQPREPQVYTLPPSREEMTKNQVSLTCLVKGFYPSDIAVEWESNGQPENNYKTTPPVLDSDGSFFLYSKLTVDKSRWQQGNVFSCSVMHEALHNHYTQKSLSLSPG

SEQ ID NO: 499 - protein, 926 aa, Artificial Sequence
  Construct
APTSSSTKKTQLQLEALLLDLQMILNGINNYKNPKLTRMLTAKFYMPKKATELKHLQCLEEELKPLEEVLNLAQSKNFHLRPRDLISNINVIVLELKGSETTFMCEYADETATIVEFLNRWITFCQSIISTLTGGGGSGGGGSGGGGSGGGGSAPTSSSTKKTQLQLEALLLDLQMILNGINNYKNPKLTRMLTAKFYMPKKATELKHLQCLEEELKPLEEVLNLAQSKNFHLRPRDLISNINVIVLELKGSETTFMCEYADETATIVEFLNRWITFCQSIISTLTGGGGSGLGGSGGGGSGGGGSIQRTPKIQVYSRHPAENGKSNFLNCYVSGFHPSDIEVDLLKNGCRIEKVEHSDLSFSKDWSFYLLYYTEFTPTEKDEYACRVNHVTLSQPKIVKWDRDMGGGGSGGGGSGGGGSGSHSMRYFFTSVSRPGRGEPRFIAVGYVDDTQFVRFDSDAASQRMEPRAPWIEQEGPEYWDGETRKVKAHSQTHRVDLGTLRGCYNQSEAGSHTVQRMYGCDVGSDWRFLRGYHQYAYDGKDYIALKEDLRSWTAADMCAQTTKHKWEAAHVAEQLRAYLEGTCVEWLRRYLENGKETLQRTDAPKTHMTHHAVSDHEATLRCWALSFYPAEITLTWQRDGEDQTQDTELVETRPAGDGTFQKWAAVVVPSGQEQRYTCHVQHEGLPKPLTLRWEAAAGGDKTHTCPPCPAPEAAGGPSVFLFPPKPKDTLMISRTPEVTCVVVDVSHEDPEVKFNWYVDGVEVHNAKTKPREEQYNSTYRVVSVLTVLHQDWLNGKEYKCKVSNKALPAPIEKTISKAKGQPREPQVYTLPPSREEMTKNQVSLTCLVKGFYPSDIAVEWESNGQPENNYKTTPPVLDSDGSFFLYSKLTVDKSRWQQGNVFSCSVMHEALHNHYTQKSLSLSPG

SEQ ID NO: 500 - protein, 926 aa, Artificial Sequence
  Construct
APTSSSTKKTQLQLEALLLDLQMILNGINNYKNPKLTRMLTAKFYMPKKATELKHLQCLEEELKPLEEVLNLAQSKNFHLRPRDLISNINVIVLELKGSETTFMCEYADETATIVEFLNRWITFCQSIISTLTGGGGSGGGGSGGGGSGGGGSAPTSSSTKKTQLQLEALLLDLQMILNGINNYKNPKLTRMLTAKFYMPKKATELKHLQCLEEELKPLEEVLNLAQSKNFHLRPRDLISNINVIVLELKGSETTFMCEYADETATIVEFLNRWITFCQSIISTLTGGGGSGGGGSGLGGSGGGGSIQRTPKIQVYSRHPAENGKSNFLNCYVSGFHPSDIEVDLLKNGCRIEKVEHSDLSFSKDWSFYLLYYTEFTPTEKDEYACRVNHVTLSQPKIVKWDRDMGGGGSGGGGSGGGGSGSHSMRYFFTSVSRPGRGEPRFIAVGYVDDTQFVRFDSDAASQRMEPRAPWIEQEGPEYWDGETRKVKAHSQTHRVDLGTLRGCYNQSEAGSHTVQRMYGCDVGSDWRFLRGYHQYAYDGKDYIALKEDLRSWTAADMCAQTTKHKWEAAHVAEQLRAYLEGTCVEWLRRYLENGKETLQRTDAPKTHMTHHAVSDHEATLRCWALSFYPAEITLTWQRDGEDQTQDTELVETRPAGDGTFQKWAAVVVPSGQEQRYTCHVQHEGLPKPLTLRWEAAAGGDKTHTCPPCPAPEAAGGPSVFLFPPKPKDTLMISRTPEVTCVVVDVSHEDPEVKFNWYVDGVEVHNAKTKPREEQYNSTYRVVSVLTVLHQDWLNGKEYKCKVSNKALPAPIEKTISKAKGQPREPQVYTLPPSREEMTKNQVSLTCLVKGFYPSDIAVEWESNGQPENNYKTTPPVLDSDGSFFLYSKLTVDKSRWQQGNVFSCSVMHEALHNHYTQKSLSLSPG

SEQ ID NO: 501 - protein, 926 aa, Artificial Sequence
  Construct
APTSSSTKKTQLQLEALLLDLQMILNGINNYKNPKLTRMLTAKFYMPKKATELKHLQCLEEELKPLEEVLNLAQSKNFHLRPRDLISNINVIVLELKGSETTFMCEYADETATIVEFLNRWITFCQSIISTLTGGGGSGGGGSGGGGSGGGGSAPTSSSTKKTQLQLEALLLDLQMILNGINNYKNPKLTRMLTAKFYMPKKATELKHLQCLEEELKPLEEVLNLAQSKNFHLRPRDLISNINVIVLELKGSETTFMCEYADETATIVEFLNRWITFCQSIISTLTGGGGSGGGGSGGGGSGLGGSIQRTPKIQVYSRHPAENGKSNFLNCYVSGFHPSDIEVDLLKNGCRIEKVEHSDLSFSKDWSFYLLYYTEFTPTEKDEYACRVNHVTLSQPKIVKWDRDMGGGGSGGGGSGGGGSGSHSMRYFFTSVSRPGRGEPRFIAVGYVDDTQFVRFDSDAASQRMEPRAPWIEQEGPEYWDGETRKVKAHSQTHRVDLGTLRGCYNQSEAGSHTVQRMYGCDVGSDWRFLRGYHQYAYDGKDYIALKEDLRSWTAADMCAQTTKHKWEAAHVAEQLRAYLEGTCVEWLRRYLENGKETLQRTDAPKTHMTHHAVSDHEATLRCWALSFYPAEITLTWQRDGEDQTQDTELVETRPAGDGTFQKWAAVVVPSGQEQRYTCHVQHEGLPKPLTLRWEAAAGGDKTHTCPPCPAPEAAGGPSVFLFPPKPKDTLMISRTPEVTCVVVDVSHEDPEVKFNWYVDGVEVHNAKTKPREEQYNSTYRVVSVLTVLHQDWLNGKEYKCKVSNKALPAPIEKTISKAKGQPREPQVYTLPPSREEMTKNQVSLTCLVKGFYPSDIAVEWESNGQPENNYKTTPPVLDSDGSFFLYSKLTVDKSRWQQGNVFSCSVMHEALHNHYTQKSLSLSPG

SEQ ID NO: 502 - protein, 926 aa, Artificial Sequence
  Construct
APTSSSTKKTQLQLEALLLDLQMILNGINNYKNPKLTRMLTAKFYMPKKATELKHLQCLEEELKPLEEVLNLAQSKNFHLRPRDLISNINVIVLELKGSETTFMCEYADETATIVEFLNRWITFCQSIISTLTGGGGSGGGGSGGGGSGGGGSAPTSSSTKKTQLQLEALLLDLQMILNGINNYKNPKLTRMLTAKFYMPKKATELKHLQCLEEELKPLEEVLNLAQSKNFHLRPRDLISNINVIVLELKGSETTFMCEYADETATIVEFLNRWITFCQSIISTLTGGGGSGMGGSGGGGSGGGGSIQRTPKIQVYSRHPAENGKSNFLNCYVSGFHPSDIEVDLLKNGCRIEKVEHSDLSFSKDWSFYLLYYTEFTPTEKDEYACRVNHVTLSQPKIVKWDRDMGGGGSGGGGSGGGGSGSHSMRYFFTSVSRPGRGEPRFIAVGYVDDTQFVRFDSDAASQRMEPRAPWIEQEGPEYWDGETRKVKAHSQTHRVDLGTLRGCYNQSEAGSHTVQRMYGCDVGSDWRFLRGYHQYAYDGKDYIALKEDLRSWTAADMCAQTTKHKWEAAHVAEQLRAYLEGTCVEWLRRYLENGKETLQRTDAPKTHMTHHAVSDHEATLRCWALSFYPAEITLTWQRDGEDQTQDTELVETRPAGDGTFQKWAAVVVPSGQEQRYTCHVQHEGLPKPLTLRWEAAAGGDKTHTCPPCPAPEAAGGPSVFLFPPKPKDTLMISRTPEVTCVVVDVSHEDPEVKFNWYVDGVEVHNAKTKPREEQYNSTYRVVSVLTVLHQDWLNGKEYKCKVSNKALPAPIEKTISKAKGQPREPQVYTLPPSREEMTKNQVSLTCLVKGFYPSDIAVEWESNGQPENNYKTTPPVLDSDGSFFLYSKLTVDKSRWQQGNVFSCSVMHEALHNHYTQKSLSLSPG

SEQ ID NO: 503 - protein, 926 aa, Artificial Sequence
  Construct
APTSSSTKKTQLQLEALLLDLQMILNGINNYKNPKLTRMLTAKFYMPKKATELKHLQCLEEELKPLEEVLNLAQSKNFHLRPRDLISNINVIVLELKGSETTFMCEYADETATIVEFLNRWITFCQSIISTLTGGGGSGGGGSGGGGSGGGGSAPTSSSTKKTQLQLEALLLDLQMILNGINNYKNPKLTRMLTAKFYMPKKATELKHLQCLEEELKPLEEVLNLAQSKNFHLRPRDLISNINVIVLELKGSETTFMCEYADETATIVEFLNRWITFCQSIISTLTGGGGSGGGMSGGGGSGGGGSIQRTPKIQVYSRHPAENGKSNFLNCYVSGFHPSDIEVDLLKNGCRIEKVEHSDLSFSKDWSFYLLYYTEFTPTEKDEYACRVNHVTLSQPKIVKWDRDMGGGGSGGGGSGGGGSGSHSMRYFFTSVSRPGRGEPRFIAVGYVDDTQFVRFDSDAASQRMEPRAPWIEQEGPEYWDGETRKVKAHSQTHRVDLGTLRGCYNQSEAGSHTVQRMYGCDVGSDWRFLRGYHQYAYDGKDYIALKEDLRSWTAADMCAQTTKHKWEAAHVAEQLRAYLEGTCVEWLRRYLENGKETLQRTDAPKTHMTHHAVSDHEATLRCWALSFYPAEITLTWQRDGEDQTQDTELVETRPAGDGTFQKWAAVVVPSGQEQRYTCHVQHEGLPKPLTLRWEAAAGGDKTHTCPPCPAPEAAGGPSVFLFPPKPKDTLMISRTPEVTCVVVDVSHEDPEVKFNWYVDGVEVHNAKTKPREEQYNSTYRVVSVLTVLHQDWLNGKEYKCKVSNKALPAPIEKTISKAKGQPREPQVYTLPPSREEMTKNQVSLTCLVKGFYPSDIAVEWESNGQPENNYKTTPPVLDSDGSFFLYSKLTVDKSRWQQGNVFSCSVMHEALHNHYTQKSLSLSPG

SEQ ID NO: 504 - protein, 926 aa, Artificial Sequence
  Construct
APTSSSTKKTQLQLEALLLDLQMILNGINNYKNPKLTRMLTAKFYMPKKATELKHLQCLEEELKPLEEVLNLAQSKNFHLRPRDLISNINVIVLELKGSETTFMCEYADETATIVEFLNRWITFCQSIISTLTGGGGSGGGGSGGGGSGGGGSAPTSSSTKKTQLQLEALLLDLQMILNGINNYKNPKLTRMLTAKFYMPKKATELKHLQCLEEELKPLEEVLNLAQSKNFHLRPRDLISNINVIVLELKGSETTFMCEYADETATIVEFLNRWITFCQSIISTLTGGGGSGGGGSMGGGSGGGGSIQRTPKIQVYSRHPAENGKSNFLNCYVSGFHPSDIEVDLLKNGCRIEKVEHSDLSFSKDWSFYLLYYTEFTPTEKDEYACRVNHVTLSQPKIVKWDRDMGGGGSGGGGSGGGGSGSHSMRYFFTSVSRPGRGEPRFIAVGYVDDTQFVRFDSDAASQRMEPRAPWIEQEGPEYWDGETRKVKAHSQTHRVDLGTLRGCYNQSEAGSHTVQRMYGCDVGSDWRFLRGYHQYAYDGKDYIALKEDLRSWTAADMCAQTTKHKWEAAHVAEQLRAYLEGTCVEWLRRYLENGKETLQRTDAPKTHMTHHAVSDHEATLRCWALSFYPAEITLTWQRDGEDQTQDTELVETRPAGDGTFQKWAAVVVPSGQEQRYTCHVQHEGLPKPLTLRWEAAAGGDKTHTCPPCPAPEAAGGPSVFLFPPKPKDTLMISRTPEVTCVVVDVSHEDPEVKFNWYVDGVEVHNAKTKPREEQYNSTYRVVSVLTVLHQDWLNGKEYKCKVSNKALPAPIEKTISKAKGQPREPQVYTLPPSREEMTKNQVSLTCLVKGFYPSDIAVEWESNGQPENNYKTTPPVLDSDGSFFLYSKLTVDKSRWQQGNVFSCSVMHEALHNHYTQKSLSLSPG

SEQ ID NO: 505 - protein, 926 aa, Artificial Sequence
  Construct
APTSSSTKKTQLQLEALLLDLQMILNGINNYKNPKLTRMLTAKFYMPKKATELKHLQCLEEELKPLEEVLNLAQSKNFHLRPRDLISNINVIVLELKGSETTFMCEYADETATIVEFLNRWITFCQSIISTLTGGGGSGGGGSGGGGSGGGGSAPTSSSTKKTQLQLEALLLDLQMILNGINNYKNPKLTRMLTAKFYMPKKATELKHLQCLEEELKPLEEVLNLAQSKNFHLRPRDLISNINVIVLELKGSETTFMCEYADETATIVEFLNRWITFCQSIISTLTGGGGSGGGGSGMGGSGGGGSIQRTPKIQVYSRHPAENGKSNFLNCYVSGFHPSDIEVDLLKNGCRIEKVEHSDLSFSKDWSFYLLYYTEFTPTEKDEYACRVNHVTLSQPKIVKWDRDMGGGGSGGGGSGGGGSGSHSMRYFFTSVSRPGRGEPRFIAVGYVDDTQFVRFDSDAASQRMEPRAPWIEQEGPEYWDGETRKVKAHSQTHRVDLGTLRGCYNQSEAGSHTVQRMYGCDVGSDWRFLRGYHQYAYDGKDYIALKEDLRSWTAADMCAQTTKHKWEAAHVAEQLRAYLEGTCVEWLRRYLENGKETLQRTDAPKTHMTHHAVSDHEATLRCWALSFYPAEITLTWQRDGEDQTQDTELVETRPAGDGTFQKWAAVVVPSGQEQRYTCHVQHEGLPKPLTLRWEAAAGGDKTHTCPPCPAPEAAGGPSVFLFPPKPKDTLMISRTPEVTCVVVDVSHEDPEVKFNWYVDGVEVHNAKTKPREEQYNSTYRVVSVLTVLHQDWLNGKEYKCKVSNKALPAPIEKTISKAKGQPREPQVYTLPPSREEMTKNQVSLTCLVKGFYPSDIAVEWESNGQPENNYKTTPPVLDSDGSFFLYSKLTVDKSRWQQGNVFSCSVMHEALHNHYTQKSLSLSPG

SEQ ID NO: 506 - protein, 926 aa, Artificial Sequence
  Construct
APTSSSTKKTQLQLEALLLDLQMILNGINNYKNPKLTRMLTAKFYMPKKATELKHLQCLEEELKPLEEVLNLAQSKNFHLRPRDLISNINVIVLELKGSETTFMCEYADETATIVEFLNRWITFCQSIISTLTGGGGSGGGGSGGGGSGGGGSAPTSSSTKKTQLQLEALLLDLQMILNGINNYKNPKLTRMLTAKFYMPKKATELKHLQCLEEELKPLEEVLNLAQSKNFHLRPRDLISNINVIVLELKGSETTFMCEYADETATIVEFLNRWITFCQSIISTLTGGGGSGGGGSGGGGMGGGGSIQRTPKIQVYSRHPAENGKSNFLNCYVSGFHPSDIEVDLLKNGCRIEKVEHSDLSFSKDWSFYLLYYTEFTPTEKDEYACRVNHVTLSQPKIVKWDRDMGGGGSGGGGSGGGGSGSHSMRYFFTSVSRPGRGEPRFIAVGYVDDTQFVRFDSDAASQRMEPRAPWIEQEGPEYWDGETRKVKAHSQTHRVDLGTLRGCYNQSEAGSHTVQRMYGCDVGSDWRFLRGYHQYAYDGKDYIALKEDLRSWTAADMCAQTTKHKWEAAHVAEQLRAYLEGTCVEWLRRYLENGKETLQRTDAPKTHMTHHAVSDHEATLRCWALSFYPAEITLTWQRDGEDQTQDTELVETRPAGDGTFQKWAAVVVPSGQEQRYTCHVQHEGLPKPLTLRWEAAAGGDKTHTCPPCPAPEAAGGPSVFLFPPKPKDTLMISRTPEVTCVVVDVSHEDPEVKFNWYVDGVEVHNAKTKPREEQYNSTYRVVSVLTVLHQDWLNGKEYKCKVSNKALPAPIEKTISKAKGQPREPQVYTLPPSREEMTKNQVSLTCLVKGFYPSDIAVEWESNGQPENNYKTTPPVLDSDGSFFLYSKLTVDKSRWQQGNVFSCSVMHEALHNHYTQKSLSLSPG

SEQ ID NO: 507 - protein, 116 aa, Artificial Sequence
  Construct
GMGGGGSGGGGSGGGGSIQRTPKIQVYSCHPAENGKSNFLNCYVSGFHPSDIEVDLLKNGCRIEKVEHSDLSFSKDWSFYLLYYTEFTPTEKDEYACRVNHVTLSQPKIVKWDRDM

SEQ ID NO: 508 - protein, 114 aa, Artificial Sequence
  Construct
GMGGSGGGGSGGGGSIQRTPKIQVYSCHPAENGKSNFLNCYVSGFHPSDIEVDLLKNGCRIEKVEHSDLSFSKDWSFYLLYYTEFTPTEKDEYACRVNHVTLSQPKIVKWDRDM

SEQ ID NO: 509 - protein, 112 aa, Artificial Sequence
  Construct
GMSGGGGSGGGGSIQRTPKIQVYSCHPAENGKSNFLNCYVSGFHPSDIEVDLLKNGCRIEKVEHSDLSFSKDWSFYLLYYTEFTPTEKDEYACRVNHVTLSQPKIVKWDRDM

SEQ ID NO: 510 - protein, 110 aa, Artificial Sequence
  Construct
GMGGGSGGGGSIQRTPKIQVYSCHPAENGKSNFLNCYVSGFHPSDIEVDLLKNGCRIEKVEHSDLSFSKDWSFYLLYYTEFTPTEKDEYACRVNHVTLSQPKIVKWDRDM

SEQ ID NO: 511 - protein, 108 aa, Artificial Sequence
  Construct
GMGSGGGGSIQRTPKIQVYSCHPAENGKSNFLNCYVSGFHPSDIEVDLLKNGCRIEKVEHSDLSFSKDWSFYLLYYTEFTPTEKDEYACRVNHVTLSQPKIVKWDRDM

SEQ ID NO: 512 - protein, 106 aa, Artificial Sequence
  Construct
GMGGGGSIQRTPKIQVYSCHPAENGKSNFLNCYVSGFHPSDIEVDLLKNGCRIEKVEHSDLSFSKDWSFYLLYYTEFTPTEKDEYACRVNHVTLSQPKIVKWDRDM

SEQ ID NO: 513 - protein, 926 aa, Artificial Sequence
  Construct
APTSSSTKKTQLQLEALLLDLQMILNGINNYKNPKLTRMLTAKFYMPKKATELKHLQCLEEELKPLEEVLNLAQSKNFHLRPRDLISNINVIVLELKGSETTFMCEYADETATIVEFLNRWITFCQSIISTLTGGGGSGGGGSGGGGSGGGGSAPTSSSTKKTQLQLEALLLDLQMILNGINNYKNPKLTRMLTAKFYMPKKATELKHLQCLEEELKPLEEVLNLAQSKNFHLRPRDLISNINVIVLELKGSETTFMCEYADETATIVEFLNRWITFCQSIISTLTGGGGSGGGGSGGGGSGGGGSIQRTPKIQVYSRHPAENGKSNFLNCYVSGFHPSDIEVDLLKNGCRIEKVEHSDLSFSKDWSFYLLYYTEFTPTEKDEYACRVNHVTLSQPKIVKWDRDMGGGGSGGGGSGGGGSGSHSMRYFFTSVSRPGRGEPRFIAVGYVDDTQFVRFDSDAASQRMEPRAPWIEQEGPEYWDGETRKVKAHSQTHRVDLGTLRGCYNQSEAGSHTVQRMYGCDVGSDWRFLRGYHQYAYDGKDYIALKEDLRSWTAADMCAQTLKHKWEAAHVAEQLRAYLEGTCVEWLRRYLENGKETLQRTDAPKTHMTHHAVSDHEATLRCWALSFYPAEITLTWQRDGEDQTQDTELVETRPAGDGTFQKWAAVVVPSGQEQRYTCHVQHEGLPKPLTLRWEAAAGGDKTHTCPPCPAPEAAGGPSVFLFPPKPKDTLMISRTPEVTCVVVDVSHEDPEVKFNWYVDGVEVHNAKTKPREEQYNSTYRVVSVLTVLHQDWLNGKEYKCKVSNKALPAPIEKTISKAKGQPREPQVYTLPPSREEMTKNQVSLTCLVKGFYPSDIAVEWESNGQPENNYKTTPPVLDSDGSFFLYSKLTVDKSRWQQGNVFSCSVMHEALHNHYTQKSLSLSPG

SEQ ID NO: 514 - protein, 926 aa, Artificial Sequence
  Construct
APTSSSTKKTQLQLEALLLDLQMILNGINNYKNPKLTRMLTAKFYMPKKATELKHLQCLEEELKPLEEVLNLAQSKNFHLRPRDLISNINVIVLELKGSETTFMCEYADETATIVEFLNRWITFCQSIISTLTGGGGSGGGGSGGGGSGGGGSAPTSSSTKKTQLQLEALLLDLQMILNGINNYKNPKLTRMLTAKFYMPKKATELKHLQCLEEELKPLEEVLNLAQSKNFHLRPRDLISNINVIVLELKGSETTFMCEYADETATIVEFLNRWITFCQSIISTLTGGGGSGGGGSGGGGSGGGGSIQRTPKIQVYSRHPAENGKSNFLNCYVSGFHPSDIEVDLLKNGCRIEKVEHSDLSFSKDWSFYLLYYTEFTPTEKDEYACRVNHVTLSQPKIVKWDRDMGGGGSGGGGSGGGGSGSHSMRYFFTSVSRPGRGEPRFIAVGYVDDTQFVRFDSDAASQRMEPRAPWIEQEGPEYWDGETRKVKAHSQTHRVDLGTLRGCYNQSEAGSHTVQRMYGCDVGSDWRFLRGYHQYAYDGKDYIALKEDLRSWTAADMCAQTMKHKWEAAHVAEQLRAYLEGTCVEWLRRYLENGKETLQRTDAPKTHMTHHAVSDHEATLRCWALSFYPAEITLTWQRDGEDQTQDTELVETRPAGDGTFQKWAAVVVPSGQEQRYTCHVQHEGLPKPLTLRWEAAAGGDKTHTCPPCPAPEAAGGPSVFLFPPKPKDTLMISRTPEVTCVVVDVSHEDPEVKFNWYVDGVEVHNAKTKPREEQYNSTYRVVSVLTVLHQDWLNGKEYKCKVSNKALPAPIEKTISKAKGQPREPQVYTLPPSREEMTKNQVSLTCLVKGFYPSDIAVEWESNGQPENNYKTTPPVLDSDGSFFLYSKLTVDKSRWQQGNVFSCSVMHEALHNHYTQKSLSLSPG

SEQ ID NO: 515 - protein, 926 aa, Artificial Sequence
  Construct
APTSSSTKKTQLQLEALLLDLQMILNGINNYKNPKLTRMLTAKFYMPKKATELKHLQCLEEELKPLEEVLNLAQSKNFHLRPRDLISNINVIVLELKGSETTFMCEYADETATIVEFLNRWITFCQSIISTLTGGGGSGGGGSGGGGSGGGGSAPTSSSTKKTQLQLEALLLDLQMILNGINNYKNPKLTRMLTAKFYMPKKATELKHLQCLEEELKPLEEVLNLAQSKNFHLRPRDLISNINVIVLELKGSETTFMCEYADETATIVEFLNRWITFCQSIISTLTGGGGSGGGGSGGGGSGGGGSIQRTPKIQVYSRHPAENGKSNFLNCYVSGFHPSDIEVDLLKNGCRIEKVEHSDLSFSKDWSFYLLYYTEFTPTEKDEYACRVNHVTLSQPKIVKWDRDMGGGGSGGGGSGGGGSGSHSMRYFFTSVSRPGRGEPRFIAVGYVDDTQFVRFDSDAASQRMEPRAPWIEQEGPEYWDGETRKVKAHSQTHRVDLGTMRGCYNQSEAGSHTVQRMYGCDVGSDWRFLRGYHQYAYDGKDYIALKEDLRSWTAADMCAQTTKHKWEAAHVAEQLRAYLEGTCVEWLRRYLENGKETLQRTDAPKTHMTHHAVSDHEATLRCWALSFYPAEITLTWQRDGEDQTQDTELVETRPAGDGTFQKWAAVVVPSGQEQRYTCHVQHEGLPKPLTLRWEAAAGGDKTHTCPPCPAPEAAGGPSVFLFPPKPKDTLMISRTPEVTCVVVDVSHEDPEVKFNWYVDGVEVHNAKTKPREEQYNSTYRVVSVLTVLHQDWLNGKEYKCKVSNKALPAPIEKTISKAKGQPREPQVYTLPPSREEMTKNQVSLTCLVKGFYPSDIAVEWESNGQPENNYKTTPPVLDSDGSFFLYSKLTVDKSRWQQGNVFSCSVMHEALHNHYTQKSLSLSPG

SEQ ID NO: 516 - protein, 123 aa, Artificial Sequence
  Construct
NLVPMVATVGGGASGGGGSGGGGSIQRTPKIQVYSCHPAENGKSNFLNCYVSGFHPSDIEVDLLKNGCRIEKVEHSDLSFSKDWSFYLLYYTEFTPTEKDEYACRVNHVTLSQPKIVKWDRDM

SEQ ID NO: 517 - protein, 143 aa, Artificial Sequence
  Construct
NLVPMVATVGGGASGGGGSHVVPYGLGSPRSKRALENLLGGGGSIQRTPKIQVYSCHPAENGKSNFLNCYVSGFHPSDIEVDLLKNGCRIEKVEHSDLSFSKDWSFYLLYYTEFTPTEKDEYACRVNHVTLSQPKIVKWDRDM

SEQ ID NO: 518 - protein, 931 aa, Artificial Sequence
  Construct
APTSSSTKKTQLQLEALLLDLQMILNGINNYKNPKLTRMLTAKFYMPKKATELKHLQCLEEELKPLEEVLNLAQSKNFHLRPRDLISNINVIVLELKGSETTFMCEYADETATIVEFLNRWITFCQSIISTLTGGGGSGGGGSGGGGSGGGGSAPTSSSTKKTQLQLEALLLDLQMILNGINNYKNPKLTRMLTAKFYMPKKATELKHLQCLEEELKPLEEVLNLAQSKNFHLRPRDLISNINVIVLELKGSETTFMCEYADETATIVEFLNRWITFCQSIISTLTGGGGSGGGGSGGGGSGGGGSGGGGSIQRTPKIQVYSRHPAENGKSNFLNCYVSGFHPSDIEVDLLKNGCRIEKVEHSDLSFSKDWSFYLLYYTEFTPTEKDEYACRVNHVTLSQPKIVKWDRDMGGGGSGGGGSGGGGSGSHSMRYFFTSVSRPGRGEPRFIAVGYVDDTQFVRFDSDAASQRMEPRAPWIEQEGPEYWDGETRKVKAHSQTHRVDLGTLRGCYNQSEAGSHTVQRMYGCDVGSDWRFLRGYHQYAYDGKDYIALKEDLRSWTAADMCAQTTKHKWEAAHVAEQLRAYLEGTCVEWLRRYLENGKETLQRTDAPKTHMTHHAVSDHEATLRCWALSFYPAEITLTWQRDGEDQTQDTELVETRPAGDGTFQKWAAVVVPSGQEQRYTCHVQHEGLPKPLTLRWEAAAGGDKTHTCPPCPAPEAAGGPSVFLFPPKPKDTLMISRTPEVTCVVVDVSHEDPEVKFNWYVDGVEVHNAKTKPREEQYNSTYRVVSVLTVLHQDWLNGKEYKCKVSNKALPAPIEKTISKAKGQPREPQVYTLPPSREEMTKNQVSLTCLVKGFYPSDIAVEWESNGQPENNYKTTPPVLDSDGSFFLYSKLTVDKSRWQQGNVFSCSVMHEALHNHYTQKSLSLSPG

SEQ ID NO: 519 - protein, 936 aa, Artificial Sequence
  Construct
APTSSSTKKTQLQLEALLLDLQMILNGINNYKNPKLTRMLTAKFYMPKKATELKHLQCLEEELKPLEEVLNLAQSKNFHLRPRDLISNINVIVLELKGSETTFMCEYADETATIVEFLNRWITFCQSIISTLTGGGGSGGGGSGGGGSGGGGSAPTSSSTKKTQLQLEALLLDLQMILNGINNYKNPKLTRMLTAKFYMPKKATELKHLQCLEEELKPLEEVLNLAQSKNFHLRPRDLISNINVIVLELKGSETTFMCEYADETATIVEFLNRWITFCQSIISTLTGGGGSGGGGSGGGGSGGGGSGGGGSGGGGSIQRTPKIQVYSRHPAENGKSNFLNCYVSGFHPSDIEVDLLKNGCRIEKVEHSDLSFSKDWSFYLLYYTEFTPTEKDEYACRVNHVTLSQPKIVKWDRDMGGGGSGGGGSGGGGSGSHSMRYFFTSVSRPGRGEPRFIAVGYVDDTQFVRFDSDAASQRMEPRAPWIEQEGPEYWDGETRKVKAHSQTHRVDLGTLRGCYNQSEAGSHTVQRMYGCDVGSDWRFLRGYHQYAYDGKDYIALKEDLRSWTAADMCAQTTKHKWEAAHVAEQLRAYLEGTCVEWLRRYLENGKETLQRTDAPKTHMTHHAVSDHEATLRCWALSFYPAEITLTWQRDGEDQTQDTELVETRPAGDGTFQKWAAVVVPSGQEQRYTCHVQHEGLPKPLTLRWEAAAGGDKTHTCPPCPAPEAAGGPSVFLFPPKPKDTLMISRTPEVTCVVVDVSHEDPEVKFNWYVDGVEVHNAKTKPREEQYNSTYRVVSVLTVLHQDWLNGKEYKCKVSNKALPAPIEKTISKAKGQPREPQVYTLPPSREEMTKNQVSLTCLVKGFYPSDIAVEWESNGQPENNYKTTPPVLDSDGSFFLYSKLTVDKSRWQQGNVFSCSVMHEALHNHYTQKSLSLSPG

SEQ ID NO: 520 - protein, 921 aa, Artificial Sequence
  Construct
APTSSSTKKTQLQLEALLLDLQMILNGINNYKNPKLTRMLTAKFYMPKKATELKHLQCLEEELKPLEEVLNLAQSKNFHLRPRDLISNINVIVLELKGSETTFMCEYADETATIVEFLNRWITFCQSIISTLTGGGGSGGGGSGGGGSGGGGSAPTSSSTKKTQLQLEALLLDLQMILNGINNYKNPKLTRMLTAKFYMPKKATELKHLQCLEEELKPLEEVLNLAQSKNFHLRPRDLISNINVIVLELKGSETTFMCEYADETATIVEFLNRWITFCQSIISTLTGGGGSGGGGSGGGGSGGGGSIQRTPKIQVYSRHPAENGKSNFLNCYVSGFHPSDIEVDLLKNGCRIEKVEHSDLSFSKDWSFYLLYYTEFTPTEKDEYACRVNHVTLSQPKIVKWDRDMGGGGSGGGGSGSHSMRYFFTSVSRPGRGEPRFIAVGYVDDTQFVRFDSDAASQRMEPRAPWIEQEGPEYWDGETRKVKAHSQTHRVDLGTLRGCYNQSEAGSHTVQRMYGCDVGSDWRFLRGYHQYAYDGKDYIALKEDLRSWTAADMCAQTTKHKWEAAHVAEQLRAYLEGTCVEWLRRYLENGKETLQRTDAPKTHMTHHAVSDHEATLRCWALSFYPAEITLTWQRDGEDQTQDTELVETRPAGDGTFQKWAAVVVPSGQEQRYTCHVQHEGLPKPLTLRWEAAAGGDKTHTCPPCPAPEAAGGPSVFLFPPKPKDTLMISRTPEVTCVVVDVSHEDPEVKFNWYVDGVEVHNAKTKPREEQYNSTYRVVSVLTVLHQDWLNGKEYKCKVSNKALPAPIEKTISKAKGQPREPQVYTLPPSREEMTKNQVSLTCLVKGFYPSDIAVEWESNGQPENNYKTTPPVLDSDGSFFLYSKLTVDKSRWQQGNVFSCSVMHEALHNHYTQKSLSLSPG

SEQ ID NO: 521 - protein, 916 aa, Artificial Sequence
  Construct
APTSSSTKKTQLQLEALLLDLQMILNGINNYKNPKLTRMLTAKFYMPKKATELKHLQCLEEELKPLEEVLNLAQSKNFHLRPRDLISNINVIVLELKGSETTFMCEYADETATIVEFLNRWITFCQSIISTLTGGGGSGGGGSGGGGSGGGGSAPTSSSTKKTQLQLEALLLDLQMILNGINNYKNPKLTRMLTAKFYMPKKATELKHLQCLEEELKPLEEVLNLAQSKNFHLRPRDLISNINVIVLELKGSETTFMCEYADETATIVEFLNRWITFCQSIISTLTGGGGSGGGGSGGGGSGGGGSIQRTPKIQVYSRHPAENGKSNFLNCYVSGFHPSDIEVDLLKNGCRIEKVEHSDLSFSKDWSFYLLYYTEFTPTEKDEYACRVNHVTLSQPKIVKWDRDMGGGGSGSHSMRYFFTSVSRPGRGEPRFIAVGYVDDTQFVRFDSDAASQRMEPRAPWIEQEGPEYWDGETRKVKAHSQTHRVDLGTLRGCYNQSEAGSHTVQRMYGCDVGSDWRFLRGYHQYAYDGKDYIALKEDLRSWTAADMCAQTTKHKWEAAHVAEQLRAYLEGTCVEWLRRYLENGKETLQRTDAPKTHMTHHAVSDHEATLRCWALSFYPAEITLTWQRDGEDQTQDTELVETRPAGDGTFQKWAAVVVPSGQEQRYTCHVQHEGLPKPLTLRWEAAAGGDKTHTCPPCPAPEAAGGPSVFLFPPKPKDTLMISRTPEVTCVVVDVSHEDPEVKFNWYVDGVEVHNAKTKPREEQYNSTYRVVSVLTVLHQDWLNGKEYKCKVSNKALPAPIEKTISKAKGQPREPQVYTLPPSREEMTKNQVSLTCLVKGFYPSDIAVEWESNGQPENNYKTTPPVLDSDGSFFLYSKLTVDKSRWQQGNVFSCSVMHEALHNHYTQKSLSLSPG

SEQ ID NO: 522 - protein, 813 aa, Artificial Sequence; identical to SEQ ID NO: 494
  Construct

SEQ ID NO: 523 - protein, 946 aa, Artificial Sequence
  Construct
APTSSSTKKTQLQLEALLLDLQMILNGINNYKNPKLTRMLTAKFYMPKKATELKHLQCLEEELKPLEEVLNLAQSKNFHLRPRDLISNINVIVLELKGSETTFMCEYADETATIVEFLNRWITFCQSIISTLTGGGGSGGGGSGGGGSGGGGSAPTSSSTKKTQLQLEALLLDLQMILNGINNYKNPKLTRMLTAKFYMPKKATELKHLQCLEEELKPLEEVLNLAQSKNFHLRPRDLISNINVIVLELKGSETTFMCEYADETATIVEFLNRWITFCQSIISTLTGGGGSGGGGSGGGGSGGGGSIQRTPKIQVYSRHPAENGKSNFLNCYVSGFHPSDIEVDLLKNGCRIEKVEHSDLSFSKDWSFYLLYYTEFTPTEKDEYACRVNHVTLSQPKIVKWDRDMGGGGSGGGGSGGGGSGGGGSGGGGSGGGGSGGGGSGSHSMRYFFTSVSRPGRGEPRFIAVGYVDDTQFVRFDSDAASQRMEPRAPWIEQEGPEYWDGETRKVKAHSQTHRVDLGTLRGCYNQSEAGSHTVQRMYGCDVGSDWRFLRGYHQYAYDGKDYIALKEDLRSWTAADMCAQTTKHKWEAAHVAEQLRAYLEGTCVEWLRRYLENGKETLQRTDAPKTHMTHHAVSDHEATLRCWALSFYPAEITLTWQRDGEDQTQDTELVETRPAGDGTFQKWAAVVVPSGQEQRYTCHVQHEGLPKPLTLRWEAAAGGDKTHTCPPCPAPEAAGGPSVFLFPPKPKDTLMISRTPEVTCVVVDVSHEDPEVKFNWYVDGVEVHNAKTKPREEQYNSTYRVVSVLTVLHQDWLNGKEYKCKVSNKALPAPIEKTISKAKGQPREPQVYTLPPSREEMTKNQVSLTCLVKGFYPSDIAVEWESNGQPENNYKTTPPVLDSDGSFFLYSKLTVDKSRWQQGNVFSCSVMHEALHNHYTQKSLSLSPG

SEQ ID NO: 524 - protein, 941 aa, Artificial Sequence
  Construct
APTSSSTKKTQLQLEALLLDLQMILNGINNYKNPKLTRMLTAKFYMPKKATELKHLQCLEEELKPLEEVLNLAQSKNFHLRPRDLISNINVIVLELKGSETTFMCEYADETATIVEFLNRWITFCQSIISTLTGGGGSGGGGSGGGGSGGGGSAPTSSSTKKTQLQLEALLLDLQMILNGINNYKNPKLTRMLTAKFYMPKKATELKHLQCLEEELKPLEEVLNLAQSKNFHLRPRDLISNINVIVLELKGSETTFMCEYADETATIVEFLNRWITFCQSIISTLTGGGGSGGGGSGGGGSGGGGSIQRTPKIQVYSRHPAENGKSNFLNCYVSGFHPSDIEVDLLKNGCRIEKVEHSDLSFSKDWSFYLLYYTEFTPTEKDEYACRVNHVTLSQPKIVKWDRDMGGGGSGGGGSGGGGSGGGGSGGGGSGGGGSGSHSMRYFFTSVSRPGRGEPRFIAVGYVDDTQFVRFDSDAASQRMEPRAPWIEQEGPEYWDGETRKVKAHSQTHRVDLGTLRGCYNQSEAGSHTVQRMYGCDVGSDWRFLRGYHQYAYDGKDYIALKEDLRSWTAADMCAQTTKHKWEAAHVAEQLRAYLEGTCVEWLRRYLENGKETLQRTDAPKTHMTHHAVSDHEATLRCWALSFYPAEITLTWQRDGEDQTQDTELVETRPAGDGTFQKWAAVVVPSGQEQRYTCHVQHEGLPKPLTLRWEAAAGGDKTHTCPPCPAPEAAGGPSVFLFPPKPKDTLMISRTPEVTCVVVDVSHEDPEVKFNWYVDGVEVHNAKTKPREEQYNSTYRVVSVLTVLHQDWLNGKEYKCKVSNKALPAPIEKTISKAKGQPREPQVYTLPPSREEMTKNQVSLTCLVKGFYPSDIAVEWESNGQPENNYKTTPPVLDSDGSFFLYSKLTVDKSRWQQGNVFSCSVMHEALHNHYTQKSLSLSPG

SEQ ID NO: 525 - protein, 936 aa, Artificial Sequence
  Construct
APTSSSTKKTQLQLEALLLDLQMILNGINNYKNPKLTRMLTAKFYMPKKATELKHLQCLEEELKPLEEVLNLAQSKNFHLRPRDLISNINVIVLELKGSETTFMCEYADETATIVEFLNRWITFCQSIISTLTGGGGSGGGGSGGGGSGGGGSAPTSSSTKKTQLQLEALLLDLQMILNGINNYKNPKLTRMLTAKFYMPKKATELKHLQCLEEELKPLEEVLNLAQSKNFHLRPRDLISNINVIVLELKGSETTFMCEYADETATIVEFLNRWITFCQSIISTLTGGGGSGGGGSGGGGSGGGGSIQRTPKIQVYSRHPAENGKSNFLNCYVSGFHPSDIEVDLLKNGCRIEKVEHSDLSFSKDWSFYLLYYTEFTPTEKDEYACRVNHVTLSQPKIVKWDRDMGGGGSGGGGSGGGGSGGGGSGGGGSGSHSMRYFFTSVSRPGRGEPRFIAVGYVDDTQFVRFDSDAASQRMEPRAPWIEQEGPEYWDGETRKVKAHSQTHRVDLGTLRGCYNQSEAGSHTVQRMYGCDVGSDWRFLRGYHQYAYDGKDYIALKEDLRSWTAADMCAQTTKHKWEAAHVAEQLRAYLEGTCVEWLRRYLENGKETLQRTDAPKTHMTHHAVSDHEATLRCWALSFYPAEITLTWQRDGEDQTQDTELVETRPAGDGTFQKWAAVVVPSGQEQRYTCHVQHEGLPKPLTLRWEAAAGGDKTHTCPPCPAPEAAGGPSVFLFPPKPKDTLMISRTPEVTCVVVDVSHEDPEVKFNWYVDGVEVHNAKTKPREEQYNSTYRVVSVLTVLHQDWLNGKEYKCKVSNKALPAPIEKTISKAKGQPREPQVYTLPPSREEMTKNQVSLTCLVKGFYPSDIAVEWESNGQPENNYKTTPPVLDSDGSFFLYSKLTVDKSRWQQGNVFSCSVMHEALHNHYTQKSLSLSPG

SEQ ID NO: 526 - protein, 931 aa, Artificial Sequence
  Construct
APTSSSTKKTQLQLEALLLDLQMILNGINNYKNPKLTRMLTAKFYMPKKATELKHLQCLEEELKPLEEVLNLAQSKNFHLRPRDLISNINVIVLELKGSETTFMCEYADETATIVEFLNRWITFCQSIISTLTGGGGSGGGGSGGGGSGGGGSAPTSSSTKKTQLQLEALLLDLQMILNGINNYKNPKLTRMLTAKFYMPKKATELKHLQCLEEELKPLEEVLNLAQSKNFHLRPRDLISNINVIVLELKGSETTFMCEYADETATIVEFLNRWITFCQSIISTLTGGGGSGGGGSGGGGSGGGGSIQRTPKIQVYSRHPAENGKSNFLNCYVSGFHPSDIEVDLLKNGCRIEKVEHSDLSFSKDWSFYLLYYTEFTPTEKDEYACRVNHVTLSQPKIVKWDRDMGGGGSGGGGSGGGGSGGGGSGSHSMRYFFTSVSRPGRGEPRFIAVGYVDDTQFVRFDSDAASQRMEPRAPWIEQEGPEYWDGETRKVKAHSQTHRVDLGTLRGCYNQSEAGSHTVQRMYGCDVGSDWRFLRGYHQYAYDGKDYIALKEDLRSWTAADMCAQTTKHKWEAAHVAEQLRAYLEGTCVEWLRRYLENGKETLQRTDAPKTHMTHHAVSDHEATLRCWALSFYPAEITLTWQRDGEDQTQDTELVETRPAGDGTFQKWAAVVVPSGQEQRYTCHVQHEGLPKPLTLRWEAAAGGDKTHTCPPCPAPEAAGGPSVFLFPPKPKDTLMISRTPEVTCVVVDVSHEDPEVKFNWYVDGVEVHNAKTKPREEQYNSTYRVVSVLTVLHQDWLNGKEYKCKVSNKALPAPIEKTISKAKGQPREPQVYTLPPSREEMTKNQVSLTCLVKGFYPSDIAVEWESNGQPENNYKTTPPVLDSDGSFFLYSKLTVDKSRWQQGNVFSCSVMHEALHNHYTQKSLSLSPG

SEQ ID NO: 527 - protein, 946 aa, Artificial Sequence
  Construct
APTSSSTKKTQLQLEALLLDLQMILNGINNYKNPKLTRMLTAKFYMPKKATELKHLQCLEEELKPLEEVLNLAQSKNFHLRPRDLISNINVIVLELKGSETTFMCEYADETATIVEFLNRWITFCQSIISTLTGGGGSGGGGSGGGGSGGGGSAPTSSSTKKTQLQLEALLLDLQMILNGINNYKNPKLTRMLTAKFYMPKKATELKHLQCLEEELKPLEEVLNLAQSKNFHLRPRDLISNINVIVLELKGSETTFMCEYADETATIVEFLNRWITFCQSIISTLTGGGGSGGGGSGGGGSGGGGSIQRTPKIQVYSCHPAENGKSNFLNCYVSGFHPSDIEVDLLKNGCRIEKVEHSDLSFSKDWSFYLLYYTEFTPTEKDEYACRVNHVTLSQPKIVKWDRDMGGGGSGGGGSGGGGSGGGGSGGGGSGGGGSGGGGSGSHSMRYFFTSVSRPGRGEPRFIAVGYVDDTQFVRFDSDAASQRMEPRAPWIEQEGPEYWDGETRKVKAHSQTHRVDLGTLRGCYNQSEAGSHTVQRMYGCDVGSDWRFLRGYHQYAYDGKDYIALKEDLRSWTAADMCAQTTKHKWEAAHVAEQLRAYLEGTCVEWLRRYLENGKETLQRTDAPKTHMTHHAVSDHEATLRCWALSFYPAEITLTWQRDGEDQTQDTELVETRPCGDGTFQKWAAVVVPSGQEQRYTCHVQHEGLPKPLTLRWEAAAGGDKTHTCPPCPAPEAAGGPSVFLFPPKPKDTLMISRTPEVTCVVVDVSHEDPEVKFNWYVDGVEVHNAKTKPREEQYNSTYRVVSVLTVLHQDWLNGKEYKCKVSNKALPAPIEKTISKAKGQPREPQVYTLPPSREEMTKNQVSLTCLVKGFYPSDIAVEWESNGQPENNYKTTPPVLDSDGSFFLYSKLTVDKSRWQQGNVFSCSVMHEALHNHYTQKSLSLSPG

SEQ ID NO: 528 - protein, 941 aa, Artificial Sequence
  Construct
APTSSSTKKTQLQLEALLLDLQMILNGINNYKNPKLTRMLTAKFYMPKKATELKHLQCLEEELKPLEEVLNLAQSKNFHLRPRDLISNINVIVLELKGSETTFMCEYADETATIVEFLNRWITFCQSIISTLTGGGGSGGGGSGGGGSGGGGSAPTSSSTKKTQLQLEALLLDLQMILNGINNYKNPKLTRMLTAKFYMPKKATELKHLQCLEEELKPLEEVLNLAQSKNFHLRPRDLISNINVIVLELKGSETTFMCEYADETATIVEFLNRWITFCQSIISTLTGGGGSGGGGSGGGGSGGGGSIQRTPKIQVYSCHPAENGKSNFLNCYVSGFHPSDIEVDLLKNGCRIEKVEHSDLSFSKDWSFYLLYYTEFTPTEKDEYACRVNHVTLSQPKIVKWDRDMGGGGSGGGGSGGGGSGGGGSGGGGSGGGGSGSHSMRYFFTSVSRPGRGEPRFIAVGYVDDTQFVRFDSDAASQRMEPRAPWIEQEGPEYWDGETRKVKAHSQTHRVDLGTLRGCYNQSEAGSHTVQRMYGCDVGSDWRFLRGYHQYAYDGKDYIALKEDLRSWTAADMCAQTTKHKWEAAHVAEQLRAYLEGTCVEWLRRYLENGKETLQRTDAPKTHMTHHAVSDHEATLRCWALSFYPAEITLTWQRDGEDQTQDTELVETRPCGDGTFQKWAAVVVPSGQEQRYTCHVQHEGLPKPLTLRWEAAAGGDKTHTCPPCPAPEAAGGPSVFLFPPKPKDTLMISRTPEVTCVVVDVSHEDPEVKFNWYVDGVEVHNAKTKPREEQYNSTYRVVSVLTVLHQDWLNGKEYKCKVSNKALPAPIEKTISKAKGQPREPQVYTLPPSREEMTKNQVSLTCLVKGFYPSDIAVEWESNGQPENNYKTTPPVLDSDGSFFLYSKLTVDKSRWQQGNVFSCSVMHEALHNHYTQKSLSLSPG

SEQ ID NO: 529 - protein, 936 aa, Artificial Sequence
  Construct
APTSSSTKKTQLQLEALLLDLQMILNGINNYKNPKLTRMLTAKFYMPKKATELKHLQCLEEELKPLEEVLNLAQSKNFHLRPRDLISNINVIVLELKGSETTFMCEYADETATIVEFLNRWITFCQSIISTLTGGGGSGGGGSGGGGSGGGGSAPTSSSTKKTQLQLEALLLDLQMILNGINNYKNPKLTRMLTAKFYMPKKATELKHLQCLEEELKPLEEVLNLAQSKNFHLRPRDLISNINVIVLELKGSETTFMCEYADETATIVEFLNRWITFCQSIISTLTGGGGSGGGGSGGGGSGGGGSIQRTPKIQVYSCHPAENGKSNFLNCYVSGFHPSDIEVDLLKNGCRIEKVEHSDLSFSKDWSFYLLYYTEFTPTEKDEYACRVNHVTLSQPKIVKWDRDMGGGGSGGGGSGGGGSGGGGSGGGGSGSHSMRYFFTSVSRPGRGEPRFIAVGYVDDTQFVRFDSDAASQRMEPRAPWIEQEGPEYWDGETRKVKAHSQTHRVDLGTLRGCYNQSEAGSHTVQRMYGCDVGSDWRFLRGYHQYAYDGKDYIALKEDLRSWTAADMCAQTTKHKWEAAHVAEQLRAYLEGTCVEWLRRYLENGKETLQRTDAPKTHMTHHAVSDHEATLRCWALSFYPAEITLTWQRDGEDQTQDTELVETRPCGDGTFQKWAAVVVPSGQEQRYTCHVQHEGLPKPLTLRWEAAAGGDKTHTCPPCPAPEAAGGPSVFLFPPKPKDTLMISRTPEVTCVVVDVSHEDPEVKFNWYVDGVEVHNAKTKPREEQYNSTYRVVSVLTVLHQDWLNGKEYKCKVSNKALPAPIEKTISKAKGQPREPQVYTLPPSREEMTKNQVSLTCLVKGFYPSDIAVEWESNGQPENNYKTTPPVLDSDGSFFLYSKLTVDKSRWQQGNVFSCSVMHEALHNHYTQKSLSLSPG

SEQ ID NO: 530 - protein, 931 aa, Artificial Sequence
  Construct
APTSSSTKKTQLQLEALLLDLQMILNGINNYKNPKLTRMLTAKFYMPKKATELKHLQCLEEELKPLEEVLNLAQSKNFHLRPRDLISNINVIVLELKGSETTFMCEYADETATIVEFLNRWITFCQSIISTLTGGGGSGGGGSGGGGSGGGGSAPTSSSTKKTQLQLEALLLDLQMILNGINNYKNPKLTRMLTAKFYMPKKATELKHLQCLEEELKPLEEVLNLAQSKNFHLRPRDLISNINVIVLELKGSETTFMCEYADETATIVEFLNRWITFCQSIISTLTGGGGSGGGGSGGGGSGGGGSIQRTPKIQVYSCHPAENGKSNFLNCYVSGFHPSDIEVDLLKNGCRIEKVEHSDLSFSKDWSFYLLYYTEFTPTEKDEYACRVNHVTLSQPKIVKWDRDMGGGGSGGGGSGGGGSGGGGSGSHSMRYFFTSVSRPGRGEPRFIAVGYVDDTQFVRFDSDAASQRMEPRAPWIEQEGPEYWDGETRKVKAHSQTHRVDLGTLRGCYNQSEAGSHTVQRMYGCDVGSDWRFLRGYHQYAYDGKDYIALKEDLRSWTAADMCAQTTKHKWEAAHVAEQLRAYLEGTCVEWLRRYLENGKETLQRTDAPKTHMTHHAVSDHEATLRCWALSFYPAEITLTWQRDGEDQTQDTELVETRPCGDGTFQKWAAVVVPSGQEQRYTCHVQHEGLPKPLTLRWEAAAGGDKTHTCPPCPAPEAAGGPSVFLFPPKPKDTLMISRTPEVTCVVVDVSHEDPEVKFNWYVDGVEVHNAKTKPREEQYNSTYRVVSVLTVLHQDWLNGKEYKCKVSNKALPAPIEKTISKAKGQPREPQVYTLPPSREEMTKNQVSLTCLVKGFYPSDIAVEWESNGQPENNYKTTPPVLDSDGSFFLYSKLTVDKSRWQQGNVFSCSVMHEALHNHYTQKSLSLSPG

SEQ ID NO: 531 - protein, 926 aa, Artificial Sequence
  Construct
APTSSSTKKTQLQLEALLLDLQMILNGINNYKNPKLTRMLTAKFYMPKKATELKHLQCLEEELKPLEEVLNLAQSKNFHLRPRDLISNINVIVLELKGSETTFMCEYADETATIVEFLNRWITFCQSIISTLTGGGGSGGGGSGGGGSGGGGSAPTSSSTKKTQLQLEALLLDLQMILNGINNYKNPKLTRMLTAKFYMPKKATELKHLQCLEEELKPLEEVLNLAQSKNFHLRPRDLISNINVIVLELKGSETTFMCEYADETATIVEFLNRWITFCQSIISTLTGGGGSGGGGSGGGGSGGGGSIQRTPKIQVYSCHPAENGKSNFLNCYVSGFHPSDIEVDLLKNGCRIEKVEHSDLSFSKDWSFYLLYYTEFTPTEKDEYACRVNHVTLSQPKIVKWDRDMGGGGSGGGGSGGGGSGSHSMRYFFTSVSRPGRGEPRFIAVGYVDDTQFVRFDSDAASQRMEPRAPWIEQEGPEYWDGETRKVKAHSQTHRVDLGTLRGCYNQSEAGSHTVQRMYGCDVGSDWRFLRGYHQYAYDGKDYIALKEDLRSWTAADMCAQTTKHKWEAAHVAEQLRAYLEGTCVEWLRRYLENGKETLQRTDAPKTHMTHHAVSDHEATLRCWALSFYPAEITLTWQRDGEDQTQDTELVETRPCGDGTFQKWAAVVVPSGQEQRYTCHVQHEGLPKPLTLRWEAAAGGDKTHTCPPCPAPEAAGGPSVFLFPPKPKDTLMISRTPEVTCVVVDVSHEDPEVKFNWYVDGVEVHNAKTKPREEQYNSTYRVVSVLTVLHQDWLNGKEYKCKVSNKALPAPIEKTISKAKGQPREPQVYTLPPSREEMTKNQVSLTCLVKGFYPSDIAVEWESNGQPENNYKTTPPVLDSDGSFFLYSKLTVDKSRWQQGNVFSCSVMHEALHNHYTQKSLSLSPG

SEQ ID NO: 532 - protein, 5 aa, Artificial Sequence
  Linker
AAAGG

SEQ ID NO: 533 - protein, 10 aa, Artificial Sequence
  Mucin Related Peptide
ELAGIGILTV

SEQ ID NO: 534 - protein, 15 aa, Homo sapiens
MTWNQMNLGATLKGV

SEQ ID NO: 535 - protein, 293 aa, Homo sapiens
QDNCTCPTNKMTVCSPDGPGGRCQCRALGSGMAVDCSTLTSKCLLLKARMSAPKNARTLVRPSEHALVDNDGLYDPDCDPEGRFKARQCNQTSVCWCVNSVGVRRTDKGDLSLRCDELVRTHHILIDLRHRPTAGAFNHSDLDAELRRLFRERYRLHPKFVAAVHYEQPTIQIELRQNTSQKAAGDVDIGDAAYYFERDIKGESLFQGRGGLDLRVRGEPLQVERTLIYYLDEIPPKFSMKRLTAGLIAVIVVVVVALVAGMAVLVITNRRKSGKYKKVEIKELGELRKEPSL

SEQ ID NO: 536 - protein, 109 aa, Homo sapiens
EIVLTQSPGTLSLSPGERATLSCRASQSVSSSYLAWYQQKPGQAPRLLIYGASSRATGIPDRFSGSGSGTDFTLTISRLEPEDFAVYYCQQYGSSPIFTFGPGTKVDIK

SEQ ID NO: 537 - protein, 124 aa, Homo sapiens
QMQLVESGGGVVQPGRSLRLSCTASGFTFSNNGMHWVRQAPGKGLEWVAVIWFDGMNKFYVDSVKGRFTISRDNSKNTLYLEMNSLRAEDTAIYYCAREGDGSGIYYYYGMDVWGQGTTVTVSS

SEQ ID NO: 538 - protein, 15 aa, Artificial Sequence
  Linker
GGGGSGGGGSGGGGS

SEQ ID NO: 539 - protein, 106 aa, Homo sapiens
DIELTQSPAIMSASPGEKVTMTCSASSSVSYMHWYQQKSGTSPKRWIYDTSKLASGVPGRFSGSGSGNSYSLTISSVEAEDDATYYCQQWSKHPLTFGSGTKVEIK

SEQ ID NO: 540 - protein, 119 aa, Homo sapiens
QVQLQQSGPELEKPGASVKISCKASGYSFTGYTMNWVKQSHGKSLEWIGLITPYNGASSYNQKFRGKATLTVDKSSSTAYMDLLSLTSEDSAVYFCARGGYDGRGFDYWGSGTPVTVSS

SEQ ID NO: 541 - protein, 112 aa, Homo sapiens
DIALTQPASVSGSPGQSITISCTGTSSDIGGYNSVSWYQQHPGKAPKLMIYGVNNRPSGVSNRFSGSKSGNTASLTISGLQAEDEADYYCSSYDIESATPVFGGGTKLTVLG

SEQ ID NO: 542 - protein, 120 aa, Homo sapiens; identical to SEQ ID NO: 207

SEQ ID NO: 543 - protein, 106 aa, Homo sapiens
DIQMTQSPSSLSASVGDRVTITCSASSSVSYMHWYQQKSGKAPKLLIYDTSKLASGVPSRFSGSGSGTDFTLTISSLQPEDFATYYCQQWSKHPLTFGQGTKLEIK

SEQ ID NO: 544 - protein, 119 aa, Homo sapiens
QVQLVQSGAEVKKPGASVKVSCKASGYSFTGYTMNWVRQAPGQGLEWMGLITPYNGASSYNQKFRGKATMTVDTSTSTVYMELSSLRSEDTAVYYCARGGYDGRGFDYWGQGTLVTVSS

SEQ ID NO: 545 - protein, 11 aa, Homo sapiens
KASQDVSIAVA

SEQ ID NO: 546 - protein, 7 aa, Homo sapiens
SASYRYT

SEQ ID NO: 547 - protein, 9 aa, Homo sapiens
QQHYITPLT

SEQ ID NO: 548 - protein, 5 aa, Homo sapiens
NYGMN

SEQ ID NO: 549 - protein, 17 aa, Homo sapiens
WINTYTGEPTYTDDFKG

SEQ ID NO: 550 - protein, 12 aa, Homo sapiens
GGFGSSYWYFDV

SEQ ID NO: 551 - protein, 5 aa, Homo sapiens
TAGMQ

SEQ ID NO: 552 - protein, 17 aa, Homo sapiens
WINTHSGVPKYAEDFKG

SEQ ID NO: 553 - protein, 12 aa, Homo sapiens
SGFGSSYWYFDV

SEQ ID NO: 554 - protein, 11 aa, Homo sapiens
KASQDVSTAVA

SEQ ID NO: 555 - protein, 107 aa, Homo sapiens
DIQLTQSPSSLSASVGDRVSITCKASQDVSIAVAWYQQKPGKAPKLLIYSASYRYTGVPDRFSGSGSGTDFTLTISSLQPEDFAVYYCQQHYITPLTFGAGTKVEIK

SEQ ID NO: 556 - protein, 121 aa, Homo sapiens
QVQLQQSGSELKKPGASVKVSCKASGYTFTNYGMNWVKQAPGQGLKWMGWINTYTGEPTYTDDFKGRFAFSLDTSVSTAYLQISSLKADDTAVYFCARGGFGSSYWYFDVWGQGSLVTVSS

SEQ ID NO: 557 - protein, 107 aa, Homo sapiens
DIQMTQSPSSLSASVGDRVTITCKASQDVSTAVAWYQQKPGKAPKLLIYSASYRYTGVPSRFSGSGSGTDFTLTISSLQPEDFAVYYCQQHYITPLTFGQGTKLEIK

SEQ ID NO: 558 - protein, 121 aa, Homo sapiens
QVQLVQSGAEVKKPGASVKVSCKASGYTFTTAGMQWVRQAPGQGLEWMGWINTHSGVPKYAEDFKGRVTISADTSTSTAYLQLSSLKSEDTAVYYCARSGFGSSYWYFDVWGQGTLVTVSS

SEQ ID NO: 559 - protein, 75 aa, Homo sapiens
QWYQQKPGQPPKLLIFAASNVESGVPARFSGSGSGTNFSLNIHPVDEDDVAMYFCQQSRKVPYTFGGGTKLEIKR

SEQ ID NO: 560 - protein, 120 aa, Homo sapiens
QVKLQQSGPGLVTPSQSLSITCTVSGFSLSDYGVHWVRQSPGQGLEWLGVIWAGGGTNYNSALMSRKSISKDNSKSQVFLKMNSLQADDTAVYYCARDKGYSYYYSMDYWGQGTTVTVSS

SEQ ID NO: 561 - protein, 5 aa, Homo sapiens
DYGVH

SEQ ID NO: 562 - protein, 16 aa, Homo sapiens
VIWAGGGTNYNSALMS

SEQ ID NO: 563 - protein, 12 aa, Homo sapiens
DKGYSYYYSMDY

SEQ ID NO: 564 - protein, 249 aa, Homo sapiens
QVQLVQSGAEVKKPGSSVKVSCKASGGTFSNYWMHWVRQAPGQGLEWMGATYRGHSDTYYNQKFKGRVTITADKSTSTAYMELSSLRSEDTAVYYCARGAIYNGYDVLDNWGQGTLVTVSSGGGGSGGGGSGGGGSGGGGSDIQMTQSPSSLSASVGDRVTITCSASQDISNYLNWYQQKPGKAPKLLIYYTSNLHSGVPSRFSGSGSGTDFTLTISSLQPEDFATYYCQQYRKLPWTFGQGTKLEIKR

SEQ ID NO: 565 - protein, 11 aa, Homo sapiens
SASQDISNYLN

SEQ ID NO: 566 - protein, 7 aa, Homo sapiens
YTSNLHS

SEQ ID NO: 567 - protein, 9 aa, Homo sapiens
QQYRKLPWT

SEQ ID NO: 568 - protein, 5 aa, Homo sapiens
NYWMH

SEQ ID NO: 569 - protein, 17 aa, Homo sapiens
ATYRGHSDTYYNQKFKG

SEQ ID NO: 570 - protein, 12 aa, Homo sapiens
GAIYNGYDVLDN

SEQ ID NO: 571 - protein, 108 aa, Homo sapiens
DIQMTQSPSSLSASVGDRVTITCSASQDISNYLNWYQQKPGKAPKLLIYYTSNLHSGVPSRFSGSGSGTDFTLTISSLQPEDFATYYCQQYRKLPWTFGQGTKLEIKR

SEQ ID NO: 572 - protein, 121 aa, Homo sapiens
QVQLVQSGAEVKKPGSSVKVSCKASGGTFSNYWMHWVRQAPGQGLEWMGATYRGHSDTYYNQKFKGRVTITADKSTSTAYMELSSLRSEDTAVYYCARGAIYDGYDVLDNWGQGTLVTVSS

1. An unconjugated T cell modulatory polypeptide (T-Cell-MP), the polypeptide comprising:
(i) optionally one or more MOD polypeptide sequences, or two or more MOD polypeptide sequences in tandem, wherein when there are two or more MOD polypeptide sequences they are optionally joined to each other by independently selected L1 linkers;
(ii) an optional L2 linker polypeptide sequence joining the one or more MOD polypeptide sequences to a β2M polypeptide sequence;
(iii) the β2M polypeptide sequence;
(iv) an L3 linker polypeptide sequence from 10-50 aa in length;
(v) a class I MHC-H polypeptide sequence, wherein the MHC-H polypeptide comprises cysteine substitutions at positions 84 and 139 that form an intrachain disulfide bond;
(vi) an optional L4 linker polypeptide sequence;
(vii) a scaffold polypeptide sequence;
(viii) an optional L5 linker polypeptide sequence; and
(ix) optionally one or more MOD polypeptide sequences, or two or more MOD polypeptide sequences in tandem, wherein when there are two or more MOD polypeptide sequences they are optionally joined to each other by independently selected L6 linkers;
wherein the unconjugated T-Cell-MP comprises at least one MOD polypeptide sequence as part of element (i) or (ix)); and
wherein at least one of the β2M polypeptide sequence and/or the L3 linker polypeptide sequence comprises a chemical conjugation site for epitope conjugation.

2. The unconjugated T-Cell-MP of claim 1, the polypeptide comprising from N-terminus to C-terminus:
(i) optionally one or more MOD polypeptide sequences, or two or more MOD polypeptide sequences in tandem, wherein when there are two or more MOD polypeptide sequences they are optionally joined to each other by independently selected L1 linkers;
(ii) an optional L2 linker polypeptide sequence;
(iii) a β2M polypeptide sequence;
(iv) an L3 linker polypeptide sequence from 10-50 aa in length;
(v) a class I MHC-H polypeptide sequence, wherein the MHC-H polypeptide comprises cysteine substitutions at positions 84 and 139 that form an intrachain disulfide bond;
(vi) an optional L4 linker polypeptide sequence;
(vii) a scaffold polypeptide sequence;
(viii) an optional L5 linker polypeptide sequence; and
(ix) optionally one or more MOD polypeptide sequences, or two or more MOD polypeptide sequences, such as in tandem, wherein when there are two or more MOD polypeptide sequences they are optionally joined to each other by independently selected L6 linkers;
wherein the unconjugated T-Cell-MP comprises at least one MOD polypeptide sequence as part of element (i) or (ix); and
wherein at least one of the β2M polypeptide sequence and/or the L3 linker polypeptide sequence comprises a chemical conjugation site for epitope conjugation.

3. (canceled)

4. (canceled)

5. (canceled)

6. The unconjugated T-Cell-MP of claim 2, wherein the β2M polypeptide sequence has at least 90% or at least 95% sequence identity to at least 70 or at least 90 contiguous aas the mature human β2M polypeptide NP_004039.1, SEQ ID NO:61, provided in FIG. 4.

7. The unconjugated T-Cell-MP of claim 6, wherein the MHC-H polypeptide sequence comprises a human class I MHC-H chain polypeptide sequence selected from HLA-A, HLA-B, HLA-C, HLA-E, HLA-F, and HLA-G MHC-H polypeptide sequences having at least 85% sequence identity to at least 200 contiguous aas of a MHC-H polypeptide provided in any of FIGS. 3A-3H.

8. The unconjugated T-Cell-MP of claim 7, wherein the MHC-H polypeptide sequence comprises a disulfide bond between position 84 and position 139.

9. The unconjugated T-Cell-MP of claim 8, wherein the MHC-H polypeptide sequence comprises an amino acid sequence having at least 90% or at least 95% sequence identity to at least 200 contiguous aas of: HLA-A*0101 (SEQ ID NO:24), HLA-A*0201 (SEQ ID NO:27), HLA-A*0301 (SEQ ID NO:35), HLA-A*1101 (SEQ ID NO:32), HLA-A*2301 (SEQ ID NO:36). HLA-A*2402 (SEQ ID NO:33), HLA-A*2407 (SEQ ID NO:37), HLA-A*3303 (SEQ ID NO:34), HLA-A*3401 (SEQ ID NO:38), HLA-E (SEQ ID NO: 58), HLA-F (SEQ ID NO: 59), or HLA-G (SEQ ID NO:60).

10. The unconjugated T-Cell-MP of claim 9, comprising at least one, at least two, or at least three wt. MOD or variant MOD polypeptide sequences, wherein each MOD is selected independently from the group consisting of anti-CD28, 4-1BBL, PD-L1, IL-2, CD80, CD86, and FasL wt. MOD or variant MOD polypeptide sequences.

11. The unconjugated T-Cell-MP of claim 10, comprising at least one wt. or variant IL-2 MOD polypeptide sequence, or at least one pair of wt. or variant IL-2 MOD polypeptide sequences in tandem.

12. The unconjugated T-Cell-MP of claim 10, wherein the unconjugated T-Cell-MP comprises a single variant IL-2 MOD or a pair of variant IL-2 MOD polypeptide sequences in tandem, and wherein the variant IL-2 MOD polypeptide sequences comprise substitutions at positions F424 and H16.

13. The unconjugated T-Cell-MP of claim 10, wherein the scaffold polypeptide sequence is an interspecific or non-interspecific polypeptide sequence selected from the group consisting of: an immunoglobulin heavy chain constant region; a collectin polypeptide, a coiled-coil domain, a leucine-zipper domain; a Fos polypeptide; a Jun polypeptide; an Ig CH1 polypeptide; an Ig CL κ polypeptide; an Ig CL λ polypeptide; a knob-in-hole without disulfide (KiH) polypeptide; a knob-in hole with a stabilizing disulfide bond (KiHs-s) polypeptide; a HA-TF polypeptide; a ZW-1 polypeptide; a 7.8.60 polypeptide; a DD-KK polypeptide; an EW-RVT polypeptide; an EW-RVTs-s polypeptide; and an A107 polypeptide sequence.

14. The unconjugated T-Cell-MP of claim 13 complexed to form a duplex or higher order T-Cell-MP comprising:
at least a first unconjugated T-Cell-MP and a second unconjugated T-Cell-MP of claim 13, wherein
(i) the first unconjugated T-Cell-MP comprises a first β2M polypeptide sequence, a first class I MHC-H polypeptide sequence, and a first scaffold polypeptide sequence; and
(ii) the second unconjugated T-Cell-MP comprises a first β2M polypeptide sequence, a second class I MHC-H polypeptide sequence, and a second scaffold polypeptide sequence; and
wherein the first and second unconjugated T-Cell-MPs associate by binding interactions between the first and second scaffold polypeptide sequences that optionally include one or more interchain covalent bonds therebetween; and
wherein the duplex or higher order T-Cell-MP is homomeric or heteromeric.

15. The unconjugated T-Cell-MP or unconjugated duplex T-Cell-MP of claim 14, further comprising one or more substitutions that reduce binding to the Fc X receptor and/or the C1 q protein.

16. The unconjugated T-Cell-MP or unconjugated duplex T-Cell-MP of claim 14, wherein each chemical conjugation site is jointly or independently selected from: a) amino acid chemical conjugation sites; b) non-natural amino acids and/or selenocysteines; c) peptide sequences that act as an enzymatic modification sequence; d) carbohydrate or oligosaccharide moieties; and/or e) IgG nucleotide binding sites.

17. The unconjugated T-Cell-MP or unconjugated duplex T-Cell-MP of claim 16, wherein each chemical conjugation site for epitope conjugation is a cysteine introduced by protein engineering.

18. (canceled)

19. The unconjugated T-Cell-MP or unconjugated duplex T-Cell-MP of claim 17, wherein the cysteine introduced by protein engineering within the β2M polypeptide sequence is at position 44 of the β2M polypeptide.

20. The unconjugated T-Cell-MP or unconjugated duplex T-Cell-MP of claim 19, further comprising one or more targeting sequences.

21. The unconjugated duplex T-Cell-MP of claim 14 conjugated to a non-peptide or peptide epitope at the chemical conjugation site in the β2M polypeptide sequence to form a duplex T-Cell-MP-epitope conjugate; wherein the duplex T-Cell-MP-epitope conjugate optionally comprises a targeting sequence.

22. (canceled)

23. The duplex T-Cell-MP-epitope conjugate of claim 21, wherein the epitope is a cancer epitope (epitope presented by a cancer cell), infectious agent epitope (epitope of an infectious agent's antigen), self-epitope (epitope of an autoantigen), or allergen epitope (epitope of an allergen).

24. A method of treating disease comprising administering to a subject in need thereof an effective amount of a T-Cell-MP-epitope conjugate of claim 21.

25. The method of claim 24, wherein the epitope is a cancer epitope and the subject is suffering from a cancer.
